United States Patent Application Publication US 2026/0191916 A1 - sequence listing, part 18

SEQ ID NO: 39 - DNA, 3384387 bp, Clostridium scindens (residues 1-1,692,194 of 3,384,387)
  source 1..3384387: mol_type = genomic DNA
atgaacatagtacaggaaaaatggccggaaattatcgaacatcttagaatagagcatgaattatccaatgtatcttttacaacctggatacagcctttaaaagtatatgatgtaattgataatacggtatttatattagtaaatatgaatgccagtgttgaatatattgaaaagaagtatcttcttcctcttaaggtgtgtatcgcagagattacagggactgaatttgaagtaatgttcatttcagaagacgatgacaagctggatgagatccagaatatggccatcgaggccagccagaagaaaaagacaaagaccgcagctgaaaaggcaggactgaatcccaagtatacatttgatacatttgtagtaggaggaaataacaactttgcccacgctgcctcgcttgctgttgcagaatctcctggcgaggtatacaatccattattcatatatggaggcgtaggacttggcaagacacatcttatgcattccatcgcccacttcatattagataagaatgctaaaaagaaggtattgtatgtcacaagcgagacttttaccaatgaactgatcgaggcccttaaaaatggaaggactgccggcaatgaatccgctatgtccaagttcagggacaagtacaggaataatgatgtcctgcttattgatgacatccagtttattatcggtaaagaaagtactcaggaagaattcttccatacttttaaccacctccacacttctggaaagcagatcattatctccagcgataagccccctaaagatattgagacgctggaagcaaggcttaggactcgtttcgagtggggcctgattgcagatatatctgctcctgattatgagaccaggatggctatcctgcagaagaagattgaactggaccatttggaaaaatataacatcccgagagacgtgctccagtatatcgctgaaaatatcaagaccaatattcgtgaattagagggatctctaaataaactgatagccctttataagctgaataacaacgatgtgatcgatatttctctcgcatcagaagcacttaaagatattgtatcttcacagaataaccgcaaagtgacgccagaacttatactcgatatcgtatcggatcatttcggcatctctatcgcagatcttaaaagtaataaaagaagcgcggacattgccaatccaagacagatttccatgtatctcatccgtactatgacagaggttccattaaaaggaattggcattattcttggaggaaaggatcattcaaccgtaaaatacggtgtagagaagattactaatgaaatgaaaagaaatgaaacactttccaataccattaatattataaaaaagaaaataaatccggcatgatgttaataaaaatgtggacaactcttggataacttgttcttcgagaaattaaatcgtgaaaaaggaaaacttatcaccatcatgtccacaaccacatccaacacaatccacacaattttaaaagtcggaaacactgataaatagagaggtggaagtagttttcctcttttccacagcccctaataagaataagacggaaatatttaatataaatatctattcccgcttcgcgaaaggagttatacacatgaaaataatttgcagcaaatctaatcttgtaaaaggagtaagcatcgtatccaaggccgttccttctaaaacgaccatgccaatactggaatgtattttgatagatgctactaccgacattatcaaactgacagcaaacgatatggaacttggaatccagactgagatcgagggacagatcacggaaagaggaatgattgctatcgatgcaagaatcttttccgagattgtacgtaaacttcctgacaatgaagtaaccattgagactgacagcaatcttcagacggttattacctgcgagaaagcaaagttcgatattgcgggtaagccaggagaagagttctcctatcttccaatcatagagaaagaggagtctatagaaatatcccagtttacgttgaaagaaattatcaggcagaccatattttctattgctgatacggagagtaataaattaatgactggagaattgttcgagataaaagataatatcttaagagtcatttcattggacggacatagaatttccatccgcaagatcgagttaaaggaccaggtgaccgataaaaaattgatcgttcccggaaagaccttgattgaagtcagcaagatattgtccggagagattgaaagcatggtcaatatctcttataccaataatcacattgtatttgaatttgacaataccattgtggtctccagattgattgaaggagaatattttaagattgaccagatgctttcaagcgactacgagactaaagtaagaatcaacaagaaagagttgctcaactgtatcgacagggcgacccttcttgtcaaagaaggagataaaaagccgattatcattaacattggggatgagcttatggaacttaagattaagtcccaggttggctccatgaatgaagaaatatatataagcaaagaaggaaaagacctgctgatcggatttaatcctaagtttcttattgacgcgcttcgcgtaattgatgatgaagaagtaaccttatatctgatgaatgcaaaagctccgtgctttatcaaggatgacgaagagaattatatctacctgatattgccggtaaattttaatgcggtagcatagggaggcttagatggaagtaattaagttaagagatgaccacattaagctggggcaggcattgaaggctgcaggtcttgtggaatcaggcgtaatggcaaaagaagtaattgtggatggccaggtgagagtcaatggtgaaacagatacgcgaagaggccgcaagctttatgcaggagatatcgtaacttttaatggggaagaaataagaattgaagattgagtctttaaaattaaagaatttcagaaattatgatcttttaaaacttgaatttgatgaagccaccaatatattttatggagacaatgcccagggcaaaacaaatatactggaggctgtatatctgtccggcaccaccaaatcgcacaggggtgccaaagacagggacctgataaagtttgaccaaaatgaatcgcatattgaggctattgtcgagcgaaacggcattaactatcagattgatatgcatttgaaaaaaaatagccccaaaggcattgcgatcaataagatgcctatccggaaagcaagcgaattatttggaatcgtgaaccttgtatttttctccccggaagatctgaatattatcaagaatgggccttctgaacgacgaaggtttgtagatctggaactgtcccagcttgataaagtatatctgaatgacttgtctaattataatcggattgttaatcaaagaaaccatttattaaaagatatggggtttggaaaacagcaagatctaatggatactctggatatatgggatttgcaattaatccaatatggtactagaataatagacagaaggaaaaaaatcgtggaagaaataaacaaaatcatttcttccattcatggaaagttgactggtggaaaagagaaccttcaggtgatctatgaaccaagcaatggaagccttactttggaacaggcgcttgccagaaatctggaaagggatcttaggatgaaaagcacgtcggtcggtccgcacagggacgatatctgctttatggcaggagaccttgatatcaggcgttatggttcccagggacagcagcggacggcagccctatccttaaaactttctgagatagaactagtaaaacaggcaatacatgatacgcctgttttattacttgatgatgtattgtctgaacttgacaaacacaggcaaaactatttattagatagtattcatgatatacagacgcttattacctgtacgggtgtagacgaatttgtaaatcatcgtttttctataaacaaagtatttcatgtccaaaatgggcaggtagcgaaagaaaactaggaggattagaatgggtacagaaaaagtacagcacgaatatggtgcggatgaaattcagatactggaaggtctggaagctgtaagaaagcgtcctggcatgtatatcggtagtacttcatcccgcggacttcatcatctggtatatgagattgttgataatgctgtggatgaggcattggcaggattctgtgatactattttggtaagtattaataaagacaactctataacggttgttgataacggacgtggaattccggttggaatcaaccataaggcaggacttccggcagtagaagttgtatttaccgtacttcatgcaggcggaaagtttggaggaggaggctacaaggtatccggaggccttcatggcgttggagcctctgtcgtaaatgctttgtctgattggctggaagttgagatattcagtaaaggaaagatatacaagcagcgttatgaacgcggaaaagtggcacagaaactggcagtcattggggaatgtgagccggataagactggtactaaagttacattcttcccggatgacactattttcgaggaaaccgagtttgattatgatatcctcaagcagcgtttccgcgagatggcgttcctcaccaaggggctgaaaatcatacttagggatgaaagaccggaggaagagccaattgagaaggtattccattatgaaggaggaatcaagcagtttgttgaatatttgaaccgcagcaagactcctttgtacgaagatattatttattgcgagggaatggcaaatggcgtagcggtcgaagtggcaatgcagcataatgactcctacagcgacaatacttatggatttgtaaataacataacgacgccggaggggggaacccatatcgtcggttttcgtaatgcattgacaaagacgtttaatgactatgcaaggaagaataagttattaagggacaacgagccaaatctctcaggagaagatattagagaagggcttaccgctattatcagcgttaagatcgaagacccgcagtttgagggacagacgaagcagaaacttggcaatagcgaggccagaggggctgtagacagcatcgtcagcaatcagctggtcgtatatctggagcagaacccatctattgctaagatgacgattgagaaatccgtcatggcccagagggcaagggaggccgcaagaaaggcaagggatcttacaagaagaaaatcagcgctcgatggaatgtctctgccgggcaagcttgcagactgctcggataaagatccgaaaaactgcgagatctatattgttgagggagattccgcagggggctccgcaaagacggcaagagaccgtgcgactcaggcaatccttcctcttcgtggaaagatattgaatgtagaaaaggcaaggcttgacaaaatatatggcaatgcggaaatcaaggctatgattacggcatttggcacaggaattcatgatgattttgatatctcaaaactccgttatcataagattatcattatgacggatgcggacgtggatggcgcacatatcagtacattattattgacgttcctttatcgttttatgcctgatctgatcaaggaaggatatgtgtatatggcacagccgcctttatataagctggagaaaaacaaaaaggtatggtatgcatacagcgatgaagaactggatggcatccttacagaagtaggacgtgacggcaataataagatccaacgttacaaaggtcttggagagatggatgcggaacagttgtgggataccacgatggatccggaacatagagtgctgcttcgggttacaatggatgaagagaccacctcagaactggatcttacatttacgacgcttatgggagataaagtagagccaagaagagagtttattgaggaaaatgcaaaatacgttaagaacttggatgtgtaggaggatagagaatggaagataatatatttgacaaagtccatgaagtggacctgaaaaaaacaatggaaacctcctatatcgactatgcgatgagcgtgattgcttcccgtgcattgccggatgtaagagacggacttaaaccggtccagagaagaatcctgtattctatgatcgagctgaataacgggccggataagccgcacagaaaatgtgcccgtatcgttggagataccatgggtaaatatcatcctcatggagatagttccatctatggagcactggtaaatatggctcaggaatggtctaccagatatccgcttgtagacggacatggaaactttggctccgtagatggagacggcgcggcagcgatgcgttatacagaagcaagattaagcaagatttccatggaactgactgctgatatcaacaaagatacggttgattttgctcctaactttgatgagacggaaaaagagcctgtagtattgcctgccagatttccgaatctgctggttaacggaacatcaggaattgccgtaggaatggcgactaatataccgccccataatctgaatgaaatcattaatgcagtggtgaaaatcattgatgatcagattgaggataaagaagagactaccattgaggaaattcttaagattattaaaggacctgattttcctacaggcggaatgatccttggcaccagagggatcgaagaggcatacaggacaggccgtggaaagatccgcgtgcgtgctgtcaccgatatagagacgatgcccaatggaaaaagtcggattatcgttaccgaacttccttacatggtaaataaggcaagactgatcgaaaagattgccgagatggtaagagacaagaagattgatggcattacagatttaagcgaccagtcaagccgcgagggaatgcgtgtagtaattgaattgagaaaggacgttaatgccaacgtgcttttaaatcagctctataagcatacccagcttcaggatacgtttggcgtgatcatgctagctcttgtgaataacgagccaagagtaatgaacattctggatatgctcaactattatcttcaacatcaggaagaagtagtaacacgcaggacaaaatacgaattaaataaagcagaagaaagagcccatattttacagggcttgctgatcgctctggataatattgacgaggtaatcaggattatcagaggatcccagacagttcagatcgcaaaggccgaattgatggagagatttggactttcagaagttcagtcacaagcaatcgtggatatgcgtctgcgcgcgctgaccggattggaaagagagaagctggaaaacgagtatcaggaactgatgaagcagatcagagagttaaaggctatcctggctgatcgaaaactgcttcttggagtcatcaaggaagagatactgatcattcgggataaatatggggatgagagaaggacgtctataggatttgatgaatttgatatctccatggaagatctgattccgaaggaagatgttgtcattactatgactaagcttggatatatcaagcgtatgtcgcatgatacatttaaatcgcagaaccgtggcggcaaaggcattaagggaatgcagactctgaaggaagattatgtggaagagttattcatgacgcatacccatcactatatcatgttctttaccaatacaggaagggtataccgtatgaagggatatgagatacctgaagcaagccgaacttcaagaggaacggcaatcgtcaatcttctgcaattgatgcctggagaaaagataagcgcagtgattccaatcgaggaatataaggatggagagtatctgttcatggctaccaagaaggggctggtcaagaagacgcctatcacggagtacgcgcatgtgagaaaaaccgggctggccgcaatcacgcttcgtgaagaagatgaattgattgaagtcaagtatacggataacgacagggatgtgcttcttgtaacaaaatatggacagtgcatccgatttgatgagaaggacgttcgcccgacgggaagaacttccatgggtgtcaggggaatgaatctggcagaccgggatgaagtgatcggcatgcagcttgattcccaaggatgtgaccttctgattgtatcagaaaagggcatgggaaaacgaacttccatcgaagagttcacctgccagaatcgtggcgggaaaggcgtaaaatgctacaagataacggaaaagaccggtaatgtagtaggcgtcaaggctgtcaatcatgatgatgaagtgatgatcatcaatacggaaggaatcattatccgtatgaagtgcgagggaatctccgtgcttggaagggttacatctggcgtcaagctgattaatctccaggagggcgacattgtcgcaagcatcgcgaaggttcgaaaaggcgatgaagaacctatagatagtgtagaagataccgatgaggaatcatagtttgataatgtggtaaatatcaatcgtacaaagaagccagaaaatctatgcagatatgcgtctgattttctggcttttaaaatgaattatttggattcttcatccttttttaattcgcgtatcagaatttctgcgattttctttaccgttaactctacgaaacgattgcactgtgcttttctttccggagaatttctctccatgccttttgtaagaatgcgacagcaagtagctccgcaagcctctttaaaatagtcgtggaattcattggtcagttcaaaacatctggtaatcttagagtcgccgggcgtcgtccttccgaagaaatatccaatgcacattgttccacctgctaatgcgccgcagatacatccgccgcccccaagtccccatggaaatcctgaactcatagcaatcgcttcgtctggaatatccacttcaaaatgcttgcggattgcatagatgacagattccgaacaggcgaatccttggttgaagatatcaaccgcgtctttctgtatttgctccatgtcaatatttgtattcatatgaaaacctcctctgctattatccattttatctcaatatgacagatttttaaagtaaaaactaaactctggtctctaaaaatatttttatcgaaaaacaataaaaatatattgaaattcaataacaaccatgatatagtattttcatacaagaaaagtataagacacaattaaaaaatagcaaaaggatgtggaatagatggatacaggatttataaagtttactaaatatgtgcttgatattatgtatttcggaggatttgtcgtactaataacacttccagcaactataaaatttcttggtaaatattattcttcggtaatcaccaagaattttgcacttatgctctttgtatttggaatatctggtattttgggcattttgattattggcattgtcatcatgttcatattcaagttattttttgttccaactcccgctacagggattattatactggttttctttattgcagccttatttagccaggttttggcagatgtatttgaaaaagcagtaaattataaagaagaaaacgatcttacaatataggaggtgccgttgtgggaataaagattaatctggatgtcatgatggcacagaggaaaatagggcttgtggaacttgcaggaaggatagatattacccccgcaaacttatccattctaaaaaataataaggcaaaggctatccggttttcaaccttggaggctatttgcaaagagttaggatgccagccgggcgatatcatagaatactgtacggatgaagacgacaaataaaagcaatcatatggaggtgctgtttatgaatgtaacggagaggccattaatcgctaagatgagagaaaattacaggtattttggaggattaagcttattatatggaataatattcgcattctgcctgtataagaatatgcatggaatcacatttcctgtatgtgtagctattacaattgtatttgcagtattatttcttaagaagattaactacaggatcatgaagcagtccttgccttatattgtaggcatgatattgctgtctatatctaccgtacttacctcttccttttttcttcatttttttaatctggcaggaattattctgctcttctttgtgtttatgatccaccagttctataatgatagagactggaattttcctgcctatttgaaacggatctttatcctggctgggacggtgatagagtcaattccgaagccttatgcacatggggcggaatatctcggaggaagcaaaaataagaagaaccatatcattattgctatagctattggcctatgcatagccatcggatctttatgcgtgattcttcctctccttcttaattcagatattatatttgcaaagttttttggagagatgctaaaatacattaatttcagaaccatatttggaattggccttactgtagtcataggatttacattgagttatgcgtttttctgcggcctttgcaaatataattttccagaaggtaaggaaagaaggagaaaatactataatcctgtaatcggaattacatttacaagcgtcatttcctttatatatcttatctattgcctgattcagattatgtatttattcataggaatccaaaaaggccttccatccgacgtcacttatgcccaatatgcaaggactggattctgggaactactgacggtgggaatgatcaattttgtcatggtattgttatgcatgtatctgttccaggatcatatcgcaatgaagattatactgacaattatatccggatgtacatttatcatgctgttttccgcagcctatagaatgatgatgtatattggcgcatatcatttgacattcctgagaatcctggttttatggttcttgatagttctggcattgattatgggaggggtaatcataagcatctataagggcaggtttccattattccgatatattatgggcgtagtgagcattatgtatataggccttgcattttccaggcccgatgttgttgcagccaaatataacattgctcatgaggagaaactgaaagttgaagatgtacgttatatgatgaaccgaatgtccatagacgtagctcctatcattgcggatattgatcctaggtctgatgtagactataattccaaaggaatatatgagaatgctgacaatctggaacaaagcatgtactactacttttctgatattgctcagggaaacgagggaatctttttcagaaaggctaattattccagaatccgcgccaaactggctgcagacaaatatttagaattaaatgacaggagcaaagaatatgactttgagtatagagactataaatattagcagacatattttgacagaattgtccggaacatttatactaagataggcggtagatgccatatcctattttgatgcgggaggaaaagaatgcgaacgatagatgtcagcgagattacagagaatataaaagagatgtgcatggaagcgaaccattatctgtcaaaagatatggataatgaaatgaaaaaggcggtagagaaagaagaatcccccttgggaaagcagatacttcttcagcttcaggaaaatcttcagatagcggcagaagataggattcccatctgccaggatacgggaatggctgtgatatttatagaaatcggtcaggacgtgcattttgtaggtggaattctggaagatgccataaacgaaggcgtccgtcagggatataaggaaggatatcttcgaaagtctgtcgtaggagatcccataatccgtgagaatacaaaagataacacccctgcgattgttcattatagtattataaaaggtgacaaagtaaagataaaagttgctccaaagggctttggaagtgaaaatatgagccgggtattcatgttgaagcctgcggatgggattgaaggggttaaaaatgcaatcctgacggcagtgagggatgcaggccccaatgcctgtcctccgatggttgtaggcgtaggaataggcggtacttttgaaaaatgcgctcttatggctaaggaggctctgacccgtgaggcaggagcacactccgatataccgtgggcaagggaattagaagaagaaatgcttgataagatcaataaacttggcataggacccggagggcttggcgggactacgactgccctggcagttaacgtaaatacatatcccacgcatattgccggacttccagtgggaataaacatatgctgccatgtaaaccggcatattatcagggaggtgtaattatggataagcatatacaggctccaattacgaaggaagtatcagagtctctacgggcaggggattatatttatattaccggaaccatctatacggcaagagacgcggcgcacaaaaggatggatgaggctctggcaagaggagaggcactgccaatcaatattgaaggccaggcgatctattatatgggaccatctcctgcaagagaagggcggcctattggatcagccggacctacaacggccagccggatggataagtatgcgccaaaacttcttgatatgggacttgcggctatgattggaaaaggaaagaggagccaggaggtcctggatgcgataatcagaaataaaagcgtctatctggcagccgtaggaggagctggggcgcttctttcgaaatgtatcaaatcttcagaagtagtagcatatgaagacttgggaacagaggcaatcaggaaactggaagtagttgattttccggttatcgttgtggctgactgcgtgggcaataatctgtatgagactgcgatcaaggagtatcaaaagatatgaaaagaatattattgatggtgttccggaatatcatcctggtgccagctatgtgggtcaaactatgttattacgcatcccatgtggacaaatatacagaggaacagcgctatgccatgcttaaattcatagtattacgcgcgaacaaaggtggaaatgtaacgatagatgtccatggaagggaaaatatcccagataaagatggatttatgttttttcctaaccaccagggattatatgatgtccttgctatattggaagcctgtaccagaccattttcagttgtggccaagaaagaagttgccaatatccagttcctgaagcaagtatttgcatgtatgaaagcctatatgctggatagagaagatgtaaggcaggcgatgcagatcataatagatgtatctaaggaagtggaacatggaagaaattatctgatatttgcagaggggacccgttccaagaatggcaacgaggtgcaggaatttaaaggaggaagcttcaaggcagccacaaaggctaaatgtccgatcgttccagtggcgctcattgattcctttaagccttttgatacaaatactataagtccggtaacagtgcaggtacattttctaaagcctttgcgttatgaagattataaggatatgaagacgaaagatattgctgcattggtaaaagaaagaatacagaagacgattcatgaaaatacagtaaattgataataataagtagagagaggatagaagtcctctctttatttatttgcagaggagaacattatgaatgagatatatggctatgtaagagtctcttccaaagatcagaatgaagaccgacagctgattgcgcttagcgaatttcctgtacccaaaaagaacatatatatggataagctaagcggcaaagatttcaacaggccacagtataagagattattaaatataatagaagaagaggatgtcctggtaataaaatctatcgacaggctgggacgcaattattcggaaatattagatcaatggagatatctgactaaaaacaagaaagcgtataaaagattcctatggatttttacagggtgtataaaagatggaagcgtataatacctttataaagtgggccacatatatggaaaatgagagcaaaggaataaaaaagtagactttaatgcgcgggtaagttataatgaaaacaattagcaaatataggttttgaatctattaactacatatattaaagaaaaagtaaactgttttgtaattaactgtacaaaaaagtctgcttttttgtacagaataagttacgaatgatgggggacaggtgtctgtgaggagtgtaagtctattagaagatctggcagagaagataggatgcgattgcctgtcagatttacgccttatgcaggaaaagtggctgccaaggctaaaggcagagttggaaaatatagatgaagaagaatatagtttgtctaattggaatgaggtgattttatatataacaggtagtcagtcaattgattctatgggaattaatgaagcatcaaaagcgaaagattatatgattcaatggctagatgcaaaaaaggattgacaatatgaaaaacctttagtataataacccttgctggagaaatactcaagaggctgaagaggcgcccctgctaagggtgtaggtcgggtaaccggcgcgagggttcaaatccctctttctccgtttagtcagtattgactgtctgagacaatcggtttcagacagttttttatggctaagatatgaccttatatgttgtacatatgaggcaaaaagacaactaagtatagtatttgtaaaaagaatgttgaaaaaaataaaaaagatgaaaaaaatatcttgacatataggtacaaataatgatactatagttgagctgaccggtgaggcagcaacacaacacagaaccttgataattgaacaatagacaacaaccctgaaaatttcttaaaagagagaatttcagaacagaacgggacatcgagagatgtccgaccttaaaacagtaataacgggaaggaattagccaagagttagttctgaccgcgatcacaacttttaacgagagtttgatcctggctcaggatgaacgctggcggcgtgcctaacacatgcaagtcgaacgaagcgcctggccccgacttcttcggaacgaggagccttgcgactgagtggcggacgggtgagtaacgcgtgggcaacctgccttgcactgggggataacagccagaaatggctgctaataccgcataagaccgaagcgccgcatggcgcggcggccaaagccccggcggtgcaagatgggcccgcgtctgattaggtagttggcggggtaacggcccaccaagccgacgatcagtagccgacctgagagggtgaccggccacattgggactgagacacggcccagactcctacgggaggcagcagtggggaatattgcacaatgggggaaaccctgatgcagcgacgccgcgtgaaggatgaagtatttcggtatgtaaacttctatcagcagggaagaagatgacggtacctgactaagaagccccggctaactacgtgccagcagccgcggtaatacgtagggggcaagcgttatccggatttactgggtgtaaagggagcgtagacggcgatgcaagccagatgtgaaagcccggggctcaaccccgggactgcatttggaactgcgtggctggagtgtcggagaggcaggcggaattcctagtgtagcggtgaaatgcgtagatattaggaggaacaccagtggcgaaggcggcctgctggacgatgactgacgttgaggctcgaaagcgtggggagcaaacaggattagataccctggtagtccacgccgtaaacgatgactactaggtgtcgggtggcaaggccattcggtgccgcagcaaacgcaataagtagtccacctggggagtacgttcgcaagaatgaaactcaaaggaattgacggggacccgcacaagcggtggagcatgtggtttaattcgaagcaacgcgaagaaccttacctgatcttgacatcccgatgccaaagcgcgtaacgcgctctttcttcggaacatcggtgacaggtggtgcatggttgtcgtcagctcgtgtcgtgagatgttgggttaagtcccgcaacgagcgcaacccctatcttcagtagccagcattttggatgggcactctggagagactgccagggagaacctggaggaaggtggggatgacgtcaaatcatcatgccccttatgaccagggctacacacgtgctacaatggcgtaaacaaagggaggcgaacccgcgagggtgggcaaatcccaaaaataacgtctcagttcggattgtagtctgcaactcgactacatgaagctggaatcgctagtaatcgcgaatcagaatgtcgcggtgaatacgttcccgggtcttgtacacaccgcccgtcacaccatgggagtcagtaacgcccgaagccggtgacccaacccgtaagggagggagccgtcgaaggtgggaccgataactggggtgaagtcgtaacaaggtagccgtatcggaaggtgcggctggatcacctcctttctagggaagagaagaagtaagggctgctgtctattgttcagttatcgaggaatgctggaagaggcatagggcgccgtaagaaggctcgatgcgattttctggcggcgatacgcccaggggcaacacccgttcccatcccgaacacgatggttaagccctgggaggccgatggtactttactggagacggtacgggagagcaggtggctgccagaatcaaaaaggaagagaaggcggaagcctttctgatatagacgggcttatagctcagccggttagagcgcacgcctgataagcgtgaggtcggtggttcgagtccacttaagcccatagccagagaacttgatgaaaacgagccggaggcgaagtttgaatctagtcgtaggcatgtcaccgcgcttggcgaggttttttcgagcctagcaagagtgacgcattgcgccgttagaagatgacggtggaagcgaatgccagacgggggattagctcagttgggagagcgcctgccttgcaagcaggaggtcacgagttcgaatctcgtattctccactcgatgcgcgacgcgcatcgcatatgtaccttgaaaaccgcatacatggaaatagaaaaaagatcaatatctagatcaagacatccgaggtaatcgcggaagcgattattcagaacaaaccagattcgaggcaacgaatagaaaaaatgccgactggccaacgccggcaacgctatgccgacgtaggatcgaagcgccgcccgtgcgcttaagtccgcttggtcatgctagaaagagcatatggtggatgccttggcactaagagccgatgaaagacgcgataagctgcgaaaagcttcggggaggggcaaataccctttgatccggaggtgtctgaatggggaaacccgcatgaggagccctcatgcatccctgcgccaatccataacgcagggaggggaacccggcgaactgaaacatctaagtagccggaggaagagaaaacaacaagtgattccgtaagtagcggcgagcgaacacggaggagcccaaaccggggcgcgtgcgccccggggttcggaccgcggaagtgattcgggaaggctagcagaacggctttgggaaagccggccagagagggtgaaagccccgtaagcgaaagcctgacagacacggcggtatccagagtaccacgagacacgagaaaccttgtgggaagaggcggggaccaccccgcaaggctaaatactccttagtgaccgatagcgcatagtactgtgaaggaacggtgaaaagaaccccgggaggggagtgaaagagaacctgaaaccatatgtttacaagctgtggaagggccttacgtgcccaaccgcgtactttttgtagaacggtccggcgagttacgccggctggcaaggttaagggctaaaggcccggagccgaagggaaaccaagtctgaagagggcgaaggagtcagccggagtagacccgaaaccgggtgatctatccatgtccaggttgaagttgccgtaaaaggcaatggaggaccgaacccacatccgttgaaaagggtggggatgaggtgtggataggggagaaattccaatcgaacccggagatagctggttctcctcgaaatagctttagggctagcctcatacgagtcttgcggaggtagagcactgaatttcctagggggcgtcaaagcttaccgaagaatatcaaactccgaatgccgcgtagatgatgtatgggagtcagactgcacgagataagttgggcagtcgaaagggaaagagcccagacctgcggctaaggccccaaaatgtgtgttaagtggaaaaggatgtgggatttcgaagacaactaggatgttggctcagaagcagccatgcattcaaagagtgcgtaatagctcactagtcgagaggtcccgcgccgaaaatgtccggggctgaaacacactgccgaagcccagggatgtaccaagtacatcggtagaggagcattggatgcgggaggaagcggcaccggaaggagccgtggaccgcatcgaagagagaatgccggaatgagtagcgagaggaaggtgggaatccttccggccgaatatccaaggtttccagagtaaagctgatctgctctgggtaagtcggggcctaaggcgagggcgggagccgtagccgatggacaacaggttgagattcctgtaccgcgatatgacagaactgtggggacacgcgtggaaagcataagccgggaatggaaagaccggcgcaagcggggcaggggctgcataggcaaatccgtgcagcgtaacccgaagccgtgacgcgtaccgaactgcaagtagggaagtatgcgagccatgcgtcaagaaaagccgctatcgctcatatcgcgcccgtaccgcaaaccgacacaggtagatgaggagagaatcctaaggccgacgggagaagcattgtcaaggaactcggcaaaatgactccgtaacttcgggagaaggagtgccatagagatatggccgcagagaattggcccaagcaactgtttagcaaaaacacaggtctatgcgaagccgcaaggcgaggtatatgggctgacgcctgcccggtgctggaaggttaaggggagaggttagagcgatcgaagccttgaacttaagccccagtaaacggcggccgtaactataacggtcctaaggtagcgaaattccttgtcgggtaagttccgacccgcacgaaaggcgtaatgatttgggcactgtctcgacaatgcacccggtgaaattgaagtaccagtgaagatgctggttacccgcgccaggacggaaagaccccatggagctttactccagcttgatactgggatccggtattgcatgtacaggataggtgggaggctaggaagcggggacgccagtcgccgcggagccgctgttgggataccacccttgcagtgctgggtttctaaccagcagccgtgaaccggctgggggacaatgtcaggcggggagtttgactggggcggtcgcctccgaaagggtatcggaggcgctcaaaggtcctctcagaatggtcggaaaccattcgcagagcgcaaaggcagaagagggcttgactgcgacaccgacgggtggagcaggtacgaaagtaggacttagtgatccggtggtataaagtgggattgccatcgctcaacggataaaagctaccctggggataacaggcttatcactcccaagagttcacatcgacggagtggtttggcacctcgatgtcggctcatcgcatcctggggctgaagtaggtcccaagggttgggctgttcgcccattaaagcggtacgcgagctgggttcagaacgtcgtgagacagttcggtccctatccggcgcgggcgtaggatatttgagaggagctgtccttagtacgagaggaccgggatggactggccgctggtggatctgttgcgcctccaggcgcatggcagagtagccaagccgggacgggataaacgctgaaggcatctaagcgtgaagcccccctcgagatgagatatccctggcgttaagccagtaagaccccttgaagacgacgaggtagataggatagaggtggaagtgcagcaatgcatggagctgactattactaatcggtcgagggcatgaccagagaggctggaaggcagaaaaagactcggagttggagtttcggatggaagtatttcccgtatgcggttttgaaggtacatgtgccttttagtaaggcccagtggctcagttggttagagcgccgccctgtcacggcggaggtcgagagttcgagtctcttctgggtcgtttaaatgggatcatagctcagctgggagagcatctgccttacaagcagagggtcataggttcgagccctattggtcccacttaaacaaaatggatggattcccgagtggccaaagggggcagactgtaaatctgttggcgacgccttcgaaggttcgaatccttctccatccactaagatgtagaatatacatctttttagccaaaggcttgtgccgatgtggctcaattggcagagcagctgatttgtaatcagcaggttatcggttcgagtccgatcatcggcttagtcttcaaatattatatcgcggggtggagcagtctggaagctcgtcgggctcataacccgaaggtcgtaggttcaaatcctgcccccgcaactcgcacgaatgtgcataattgaatactttatgtattagcccagatagctcagtcggtagagcagaggactgaaaatcctcgtgtcgctggttcgattccggctctgggcattttatttaccaaatatttgatatgggcgtgtagctcaggtggtagagcacttgacttttaatcaagttgtccggggttcgaatccccgcacgctcatggaatgagagggagacagataccgtaataggtactgtctctttttactttaatacgtaaatgtgttgacagaatgcatattttcttgtatattaggtaataataaaagggagtaactggcgcttaggtctaatagtccggcgtttgcgatgtcgtcagtacgatgagcaatcatccgtatcgtaatgaaatggtgagacttttattgcatagtggttctgtgcaataggggtctatttttttaccccattgcaggaggaaagagagggcaagcaatgctaacaagtttacaagcaagaaaaaaccaagagatttatgggtttaatgaactggtagaaggcaagaaaaaaagcatgatccagatattcctggagcaattcaaagactttcttgtcattattctgatcattgcagcgatcgtatcaggttttctgggagatgcagagagcgcggccgttatatttatcgtcattactatcaatgcgattctagggaccgtacagacggtaaaggcagagcagtcgctaaacagtttaaaacaactgtcagcacccgaggcaaaggtaatcagagatggcgtggtgatacagataccatccagagaagtaactgttggagatgaagtagtaattgaggcaggtgactgtatccctgcagacggaaaacttttggagtgtgcaagcctcaaagtcgatgagagcgcgctgacaggagagagtctgtccgtggagaagtcgttggaagaagcgtcggaaggcgctgcattgggagaccagacgaacaaagtgttctctggaagtttttccacatatggaagaggaacgttcgaagttacggctattggaatggagacagaagtagggaagattgccaagttattgaagacgacatcggaaaaacgaacacccctccagataaatctggatgactttggaaagaaactgtctatcattatacttgtattctgcgcaattttatttgccattaatgtgataaggggcggttctgctgtggatgcattcctatttgcggtagccctggccgtagcagcgattccggaggcgcttagttctatcgtaacgatcgtactgtcattcggcacccagaaaatggccaaggaacatgcaattataagaaaacttcaggcggttgagggcctggggagcgtatccatcatctgctcggataaaacaggaactctgacgcagaataaaatgacagtggaagactactatgtggatggaaagagaatctccgtggctgatattaatcttgatgacagaaaccagaagatgcttcttaattgcagcatgctctgtaacgattccaccaatacagatggacaggaaataggagatccgacggaaacggcactgatcaatcttggaagcaatcttggcatggaagcggctatgaccagggaaaggtatcctcgtatgtcggaagtcccatttgacagtgacaggaaattgatgtctacagcacatgtcttcggagatcgatatgtgatggtagccaagggggcggtagatgtacttctgaggcgtatgagccacatcaggattggcgatactgttagagagataacggacgaggaccaaatgcagatcgagatacagaatctggagttttccagagacgggttgagagtgctggcattcgcatataaagaactggatggagagaaagaattatctatagaagatgaagagggtcttacattcctgggattgatcgcaatgatggatccgccgagggaagaatccaaagcggcggtggaagaatgtataaaggcaggaatcaggcctataatgatcaccggtgatcataagattaccgcagcggcaattgcaaaaaggatcggtatactgaaggatgaatcagaggcttgcgaaggcgctgtgatagaagaaatgtcagatgaagaactgaaagatttcgtagagaagatatcagtatatgccagggtatccccggagcataagatcaggattgtgcgggcttggcaggagaaagggaatatcgtagccatgactggggacggggtaaatgatgcgccagctctgaagcaggccaacataggcgttgccatgggaattacaggaagcgaagtatccaaagatgcggcggcaatggttctgacggatgataactttgcaacaattattaaggcagttgagaatgggcgaaatatatatcagaatatcaagaattccattcagtttctgttgtccggaaactttggcgcgatattggccgtgctgtatgcatcaattgccggacttccggtaccatttgcgccagtgcatctgctttttatcaaccttctgaccgatagtcttccagccattgcattgggactggagccgcattccaaggaagtcatgaaacagaagccgcgccccatgaacgaatctatattgacgaagcagtatcttctcagcataggcaccgaggggcttagcataggcattatgacgatggcagcatttctgatcggatacagaagcggtgatgccattctggcaagcacgatggcatttggcactttgtgcaccagccggcttgtccatggatttaactgcaaatccagccgcccggtactatttacaaaaagattttttaataatatctacctgatcggagcatttttaattgggcttgtgttgattacaggcgtattggtgattccggggctgcagggtatattcaaagtagcaagccttaatatggggcagctgctgactgtatacggactagcattattgaatctgcctgtggtacagttgttgaaatggattagaaattctagataggaacaggagattttatggaattaagtagagagacggtaaaaagaataaaaggactgatcgtttttgccgcattggttgtggcctgcctgtggaagtatgatgtggtggtatcggttcttgcgtttatctttcatgtcatatttccattcgtgcttggcggagcgatcgcattcattttgaatgtgccgatgaatttcatccagaggcatctattcgcgccggagagggtagaaaggcataagatacagaagaagattgcccgtccggtcagtatgctgatcgtaatattcggagtgtttggcattgtggcgcttgtaatgtttgttctgataccgcaattaggagatacattctctaatctgggaagcagcattcaggcgttcattccaaaggtacaggaatgggcggaaaaattattccatgacaataaggagattatgacctgggtcaacagcctgaaattcgattggaataagatcatgggcgcaggcatagatttcttcaagaatggggcaggaagcgtgcttgattctacgattactgctgcaaagagcattgtgagcggaattactaccttctttatcgcatttgtatttgcggtctatatcctgctccagaaggaaaaactaggcattcaggctaaaaaggtcctatttgcctttgtaagaaaaggccgggctgaggctgctatggaagtattgtcgctgacctacaatacattctcaagtttcctgactggccagtgcctggaggccattatcttagggagcatgttcgtcgtaaccatgacgctttttaaactgccttatgctttgctggtagggattgtcatcgcgtttacggccttgattccaatatttggtgcatttatcggctgtgctgtgggagcattcctgatttttatggtagatccatttaaggcgcttatatttgtaattttgttcctgatactccagcagatagaggggaatctgatctatcctcacgtagtaggtaattcagtagggcttccatccatctgggtactggcggcagtcagtatcggaggaagcctgatggggatcgttggaatgctgatttttataccgattatctctgtagtatatgcgctgttccgggaaatcgtctacttgaaattaagacaaaaaaagataaatcccaaagaacttgaataacctatcgaagaaaatctgttatcaaaggcatctttggaatccactattattatgtgcatctataaagaagacagacggagcagggccatcagataggatcctgctctatctttttctactcagcctgctacgaacggtccatgatcttacagtaaatgacggcaacagccgtacttatggctgtggatatgattccggcgccgacgatggcagcaggattgacgcttccatactggctccggtaggcaatgacatttaccgggattaattgtagggaggagatgttgataatcaggaaggtgcacatctcattactggcaattccctttgggcgcaccgtacctggaagccggtggctacgcctgtcttcctccaatttaccgagttcgtccatggcacgcagtccggctggcgttgcggcccagcccaggcccaggacattggctataatattggtggtgatgtgttcctcggctgggtgcccggtggggagtcttgggaataagaagcgtatgatcggacggatttttttggaagcgcccttaatgattccggctttcgtggcaatctccataagacccacccagaaggacatgacgcccatcatagtgatgcacaaggtaatggcctctttggaagagtcaatggcagcattggtaatatccggcatgcgtccggtaaaggcggcaaaaataatgccaatcagtatcatgccggcccacagataattcagcatataaaatcctcgtctggctttttaatatatcgtatgagccgggatggatatttagcacaaagacataagaaagaggcggaagcagttggttcctaacttccgccatcctttatgtatactatttgactacttctttgatgattctgtgccagttcttataggcgatcttttcaatctcatcttcgtggaatccgacgcgcttcatttcctcaatgacatttggtacataagaggcatcctcaagtccgatggtaaaaggagtagactggctgctgaaagagcccaaggtatctccctccaggaattcagaaaagtcaaatccgaaaccgacatgatcaatgcccattacttccaccatatggacaagatgttttaccaggttttccagagtctgcttatcttcctccatatgaacgaattcattaaatgaattgagcccgactatgccgcctgtgcgtgccagttcttttaactggtcatccatcagattccgcgggcggttgcacagtgcccggcagttagagtgggttgctacaacagggcctgtggcagtgtcaaggagatcccagaaggatgcatcatttagatgggacacatccagtatcattcccagatcctgaatctttctcacagccctgcggcccacgtctgttaacccgcgctccggggtgccaagggctccggtagccagaggattttcctcattccaggtaagccctgcatgccttgcgccaaattggtagaactcgtcgataaggtctaagtcttccccaatactctttaaaccttccagtccgataaatgcatacatctttccttcacttcttgcagtcatcatatcggaatatgagcgcgataccttaaggatatcagcacaatcaggttcttcgcaggcaatggcctccatcatctggcgggtacgcttcagcgggtccttgtcatagggaggatcattccatatgacgaagatgcctccttcgatctgcccttttttcagccgttcataatgatatttacggaagatatcacgctctccctttagatgatgctgcgttacatcggtccaaatatcagaatgtgcatcaaagttcataaaaatacttcctttcttttgtttgaagaaatataaataaatcagagacggacagttgtccggccctgatcattttcctaaattcaggatgttatttagttttataatcctaagatgctgcctacgatcaatccaaagtatgttccaagaacatatcccagagtaccaatcagtacgataggtcctatcagcttggtccagcccttagatacagccatagcaacggccgttgttggtccgccgatgttggcattggaggcaaggataatatcttccagattgaacttcaataactttccggcgatcaggctgaaaagcatatttacaattacgatgatagccgcaaataagagcagtaacggcgaattcttgataatcataggtacggatgccggaacaccgattacgaagaagaacaggtagattaagaatgtacctagttcctgcgtacccttgatctcgccaaagaacttaggtgcaaatgttgcacaaagcatggcaattgtcgtaatccataagtacatatttccgaacagtgtattcaatatctgcaggaatgtattagatttcggtatcacgcctgcaagccctgtagatattacgttagacaatgcaacaataacaaatcctgttgcagcggccaatgcgatatcttttagggaaatttcttttctgccccagaatgcggaggcatttgtctcattttcctttacattagctccggcagccgcttccacttcatccacatatggatgcttgaaatgcttgcggaagaatccgatagatggcattgctatcaatacgaagaagtacagtaccatcagtaagttatctgcaaccgttgcggcagatatcatgtcgccagatacatcgaacgctgctccaagagcggcaaagtttaccgtacctccgatataggttccggtaaatacgcccgcaagtccggcaagttccggaataaatttgtggagcgccgtataagcgagcaacgcgccgcaagcggtacctaccgagccaattaggaatataatcaggatacgccctgattcctttccaatctttctcatatcgcactgcagcaataatagtggaatggaaagcggtacaacgtaaccccatacggcatcccatacaggagcgtccattggaatgattccaaagttcgataagatgattgcgaaaatcagtgcaacgatggcaccggtcatttttgctgcccatttatacctctgctccagatatattgcggcagcggcgccggtagcacagatagcccacagcacccaggtgttatccgctccaaccagcggattttgtagatcgaatatatgtccccacatactctcgtcctcctttcaaaaatccttttttgaagaattttcgtcaatttttacaattgaactaataacagtatataaaaattgtcaataaaagtcaataaatgtaaagaaaggacaggattaggcttggaaaatcaaaggaaatcctcaaattttacagaatattttagtgtttgttcagagtcctccaaacaatcagaagcatagcgccacaattttctttgttcatgaaatcaccgctttttccagatccaaagtgcagcaataattccaatcgtatacaggatgctgactaggatggaaggattatcttttaataaataagtaactgcaacgacagctgcaagagaaaccgtaagctggaatgcagtgaagatacgtttttcgcgggtttcttttgcctgctggctcatttccgttcttttctgctctaattccaggtatttgataaggtccttttcattgaggtgggaaaggatccattgatctctggaaaatccgtcctcatcgtcttccgatgagtaagaatccataatttttttatccgatttttcctttttaaaaaagtgaaagtcttttcgctgctcatcaggcgccgtggctgcctttggctcatcagaagtatccggggctttcttcggttcttcggatgccttaacttcttcagtggtctcgggtgctgcgttcttttgttcttcagtcataggatgttcctccgttaggtattttatatatattacatgaattgcagatttatcttcatgatatagattgtagacgtttttccacatattttcaaggttattcagcatatattgggaatagacttcacacggaaatgaggatgcccgatgaaattattcatgtatgtcacggattttatcgttccgctggtaatattcggaattgtcagttatggagtgctgatgaaggtaaatgtctatgataccttcatcaaaggcgccaaaagcggctttttcacggtaattaaaataatgccgacgctgatcgggcttatggtggcagtaggagtgctgcgggcttcgggattccttgattttctgtcaggaattatcgggcagtttacggaatacataggatttccaggagaactggtgccgcttacagtggtaaagatgttctcttcttcggcggccacggggctgcttctggatgcgttcaaggagtatggaacggactcgtacatagggctggtggcatccatcagcatgtcctgcacggagactatattctacaccatgagcgtctactttatgacagccaaagtcacgaagaccagatatactctgggaggcgccatgcttgcgacctttgcagggcttgtggccagcacggtgctggctgggatgatggtggccgggtaatagtaattctaccagaaaagggtaactgtgcaaggcccggacacagcgatatggatattaaagtcaggaattggtagaaatagcgtttcaaaaatgataaaattaaaaagacctatgaaatcaaggacaagttggagaatacaaatgcagttacgcaatgagatcccagacacgttctggagcctgttccggtccgtgaaccgggagatatacattgatgcgctattatatatcaatgaagaataccaatataataactatttccttaccaaagaggcatgcatccaggttctaggcgatatgaatgccaggaagcggtacgagcttcaatgggaagaaagcgagtctgaattcgatatgctggagacgccgtcatcccgtatcttgaactggcttcttaggaccggatggcttaaacggatagaggattataatacgctggtgaccaatatcgtgatcccggactattccgccatatttattgatgctttcgaacgcctcagttccgaggatatggaggagacagacatctatatccagaatgtctatgccacgttattttcctttcagaacgatgcaagagccaatctgggcatgcttcgcacggctttggtgaatacacgcaggcttaataaggcgctgcaggatatgctccataatatggacaagttttttgcacggctcttggatcaaaagtcttatggcgatcttctaagagagcatctggacgggtatgtggaggaaatcgtgaggaagaagtatcatatcttgaagacttcggacaatttctatatctataagatggatattaagaagtgtctgcgcgatatgcgggaggatgaagcgtggatagagcaggtaagagaacgttcaagggccatgggagatacaggggaggatgtattggaacttctggatctgatcgagaggggattcgatgatattgagcataggatcgccaacatggacaaggaacataccaaatacgtccgcgcgacggtaaccaggcttaactatctgcttagcggagaatcggatacgaaaggactggtcgtaaaacttttgaaccgaatgtcagagagcgcggattatgatgaggtgctggcaaagacgggggagaagatgaatctctccctgctggagatattatcggagaagtccttgtataaaaggcggaaggggcgaagatactttatcagccagatggagccggatgaagagattgcggaccttgacaaggaagatgtgctgaagcttaaccgcatccaggtacgctataccaaggaacagattgaggccttcattgaatcccacatggatcagaacgatattatggatgcggcacaggtagatataacggatgaggaatcctttgaaaaattgatcttggcctatgattacagtaccagagggagcagcaagtacatggtgctggaagaagagccaaagatgatagaaaaagggccgtataagtatccggcgctgaagtttgtaaggagaagattatgatagactattttgaacagctaagccaggaagagcaggaggttatcacggaggtaatccagatcctgtaccgccagacatttctgctggagaggaagtatgacaaaaggtcggggcgcatgcagtatgtgcgggagtatcggatatgcagcaagcatctggaattcttaagggcatattataaagttgcgggcattacattgaaagagaatgcccatatgggcctgatctatatccagggggaggctttgtggggagagaagctgccaaggcttgcaaccatctatctgttggtattaaaactcatctatgatgagcagatggcgtcggtatcttccagcagtcatattgtcaccacgttgggggcggtcaacggaaaggcaggagacttccgggtgctccatggcctgccttctcctacggaaatgcgccggaccatcgcgcttcttaagaaatatcagatcatagagccgctggacgttctggaggaattgaacgagcacacgaggcttatcatatatccctgcattcacgcggtgctgatgggggatgacattaaggaactgttagagacatttggcgaggaggagaacattggagacgaagcagccattcaaagcactctcgaggatatgcctgaataactggcattatatagataagaagatattgactttaagcgaagggattaatttctttaccggccattccggaagcggcaagtctacggtgatcgacgcgatccagatcgttctgtatgccaatacggatggccgcgggttctttaacaaggcggcggcagacgattctgaccggagcctgatcgagtacctgcggggcatggtaaatatcagtgagaataatgaatcccagtatcttcggaataagaacttttccagcaccatcgtactggaactggaacagaccaataccagagaaaagcagtgcgtgggcgtcgtatttgacgtggagacggctaccaatgagattagcaggctgttcttctggcatacgggagaacttttaaataaccattaccgcacggaaaaaagatgtctgacgaccatagaaatgcgggagtatctgcaaaggacgtttccgccggaaggattctactgcggcccgagcaatgagagattccgccgccagctctatgacatttatctgggcgggcttgacatggataaatttcccaggttatttaaacgggcgatcccgttccgcatgaatatcaagctggaggactttgtaaaagagtatatctgcatggagcaggatatccagattgaggaccttcaggagagcgtcatgcagtatggacggatgcagaacaagattgaagagacgcaagaagagatcagaaggcttaatctgattcgggagcagtatgaggaattctgcaaagagcaccgggaggtggaagcctgcacgtaccagattgaccggctggaagaactctggctggaagcaaagatccaggaatgccgggataagtcgctggggcgccagggggagatcggcaaacaggaagcggttaaggaacagctggaatcacaggccagaatcctacagaaggagtatgaggatattattctcaggatcgccgacagcggatatgccaatctggagtcagaactggctggccttaatgagacgcttgagaggctgggggccagcaaggcacgctgggggcagacagccgaccgcctcaaagagtggaagcagcaggatgtgacgcccaaccagtccatctgggatatcgacaaattcgcggacggaagcatttccgaaggggaacttgagaggctcaaagagagccttctggatatccaggaagaattagaagagcagcgccgggaggcagactcggacctgcgcaagatcaagaaggaagaaaaggatgccagagaggaattaaaggaactgaagcaggggaagaaggcgtatcccagggaactggaagaggccagatacgaactgcgcaaccgtcttcacgagcgatgcgggaaattcgtcaacgtacagatactcgcagaccttctggatattaaggatgagcggtggcacaacgcgatcgaaggctatctgggcagcaataagctgctgcttgtggtggaaccgggatatgccagggaagccatggacatctaccaagggatggacagaaagaaatattaccgtgcggccgttctggacacggagaaggtcatggaggatgggcaccaggcaaaggagggctcccttgcagaggaaattgtggcaaaagagccttatgtcagggcttacatcgactttttcctgggaaatgtgatgaaatgcgaatctatagaggaactgcgggagcaccggatcggaatcacgccggactgcgtcttgtatcacagctaccgcctgcagcatatcaatccggataattataccaggcgggcctatatcggagagacgagtatgcgaaagcgtatccgccagttggaggagaagtgccagcatctccaggaagagcgtctgcctctgcaggagatgctggaggaaatccgaaagactatgcagctggaaatgctgatgcagccgatctccgattatctgggctggctgtctgatatagagcagattccggcaaaagagcgaaggaagaagcagatcgtagagaaaatgcagcgcttaaaagaggaatccgtggatacctggaatcgtcagaaagaggaaatccagcggcagcaggaggataaaaaagcgcagatcgatcaggtgcagaaggacatctggaacaaccagaaggatattgaacgattccgggaggaacttatacagtccgagtccgcattggtgcagcagaagcaaaagactgtggaaaaccctgaatatgagcaagaattccaggagtaccttgcagggaagaaatcatccaattatgaatatctgaagcggcagaggattgcagagcgctatccgaagcaggaaagggaggagcaggcataccagaaactggtggatatccgaggcgaatacctgaggaattatccaaaccgtacctactccgcggcaattaagaataacgaggcttacgataaactgctgaacacgctgcagtgcgacgatctggaatcttaccgggagtcggcgaaagaacaggcgcgccaggcggtggaacattttaaggatgactttatctttaagatacgaagcgccatccgggaagcctaccagcgcagggacgaactgaaccgcatcatcagcaggctggacttcggaaaagataagtatcaatttgtaattaccaagaataaaggggccgacgggaaatattacaagatgttcatggacgattcgctgcagatcaatccaagccagctgaccaataccatagacaatcagcttaacatgttcaccatggagcatgaggatcagtacggggatctgatgaatgaactgatcaacatcttcatcccgccggaaaacgcaacgaaggaagaactggacgaggcgaagaagaacatggacaagtatgcggattaccgcacctatctgtccttcgatatgcagcagatcgtaaaaggcgataaagatatgaccatcggtcttagcaagatgatcaagaagaactccggcggcgagggacagaatccgctgtacgtagcgcttcttgccagtttcgcgcaagtttaccgtatcaacctctcgcccaaaatccacagaagccccaccatacggctggtcgtactggatgaggccttctccaagatggatgcggaaaaagtggccagctgcatctcgctgatccggggactcggcttccaggccattatcagcgctaccaacgataaaatacagaattacctggaaaatgtagataagacattcgtgtatgccaatccgaacaagcggcatatatcgatacaggaatttgagaggaaagattttggggaactgaaagattgaaagataacacgtaacaatattaagatgtgcacgtaacacttttcaaaaatgttacgtgcacatcttaatattgttacgtgtcaaaccgcactaactggtgtgtcaaattgaaaggagcgtgccagaatgtatattgtagataaaattataaataaatgtgaaaaaagcagcagggattggcgaagcggtgcctccgggcgccgtacgatacagattatgcagtcggattatgacagatgtgggaaatcagtgctgataagcgaagtgaaggaattggaattccgggggctgatcgagattgaaaagtgggtaaccagaggaagcgatgtagatataattgcttttcgggtggaaaagctggacagattctatgaattagccaaaagcgaggggagaatggtctggccgaaacaggaacgggttgattattatagagggatgctggaggcagaacttgggaagggtatagaaaagaattggatccgggagtattacagataccttatatccagactggataaaggaaattttccaaaagatgtggagaaattagaattatatacttgctgcctcagagggattgacgaattgaaggagcctgtatataaacgcatattcagcaaaaagtaccttaacaattcaaaaaaatttgaaaaggaggtgcagggccatctcatatctgtagcaaagaagtattgggatgagatcgaagaagatatggatgacaagacggtgctgtcgcagttactgctcgaggaatacgctcaggaactggaaatgaaagggcccctcaggctgattatcgaatcagggggtaagatgcaatcggaagaaggaacagagatagaaggagagacaccgccagatcaagaaatagatatatctgccttcatctatggcgttacattaaacagtgcgatgctgaaatatagcagaatcgcgcctaagcagccggatatcagacgtatcattaccatagaaaataaggcaaattttgtatctgtgccctatgatcctcacacattatatattttcagccatggatacttttcgccaaaagaaagggaatttttgaaaaaattggcgtatattttgaacgaagaggatgtgggatattatcacagcggcgatctggattacggcggtattaagatatatgaatatattaagaaacgaattttcccggaattaaggccttatctgatggatgtagagacttatgacaggtatttggaatatggagaggaagcgccggaaagtgtcctgaagaagataaaaacggtgggattgccggagtttcaagggctgataggccgtatgctggagacggggcttatgattgagcaagaaagttttttgatttaaacgccgatatcgagtttgtaaaagatgagatagagaagataaataagtgcaaaagaaccgctgccgttggggtgaggacagcggttcttcttttacgatgttatacgctttctgcgatttttgggtaattctcaggaattcatcgatagcttccgtgctgttgcaatgcagcggggatacgcggatcgcgccttcgatctcgagggcttctacgattctcttggagtacatgctgcttcttaagcgctcgaatacggtaacgccgtgatcgagatatttttgtacgcattcagagtactcaattcctttaatgcccatggcgacaatcaggtctttatatgtaaggtcttccatatctacagatacttcgacattatcaatgtgtcttaagcctggaacttcgtcggttccttccagcatgcggtagagaagcgctctttcctggagatggctccggttcatgccttccacatacagggcacgcttatcagccttatcggcatcctctaagaaatgcgcgccgatgtcgcatacatagtcgatgacagccatcattgccgcatagtttgccggcaacggggttccgagatttcacacatccattcgccgtcctttagaatatatactttctgattacgtcaaaggatgccggtcctacatccagtacggccttgtggaaccgcttctgggtgaatccgtctccccacttatccatggcatcttttttcagttccaggaattccacatagccgatgtaatatttcaagtagttggcagggtccgcaatgatcaggtcatagatgtcttctatggtattcgtatccgtgataccatagccgcggaagaaggatactgtatctaacagcgtccatccgtcatagtggatgcccatgtccgccagcgcatacaggcccaggatgacggaggtattcttctgcatcagagttgcctgctccttggtaagcggcgtatagtagtagctcatcatctcgctgtaagtagcccagccttccgtgtatccgccataattgagaagattgcggatggggtctggctttcggctcgcataatagaccgtctggtacagatggccgggatatccttcgtgggccagggtcgtaaatagagagatgtcgtcaggcatgtgtccctggttaatatagatgacgttattcttggtactgtcgatggcaggcaccatatagaatgcagggcttagatattcttccatggacttctgcacgtatttaatctgggtgctgacttcgggaggagcagggaaagagtccttaagccttccttccagacctgccaatatggaggcaggattcgaatcttccagtaccgtgccctgggtcttaaagacatccgaggagatagaggagccctgcgtggaagccgccagcacggtctgcatggctctcaggtcatccagcatctgtgtctgcgtcagctgctgaagctgggggatcgtacggctggatccggtctcgtttgcaacgacgttttcatagtattcacgcccctttggcagatagcatagtccgttattgttcttgccgctggtgcgcaaggcagccagtccgtcttttaacagactgtaagagggaaaaatatattctttgatagcagaagcatttttctctatgtaggatgcctgctcttcctccttcagttttaaggacttcagacgttcctcaaaggaggaataaaggtagttctcatcccccatatcgataaaggcctgacattccttcatgatatcgtcggcagaataggaggccataaaaagcccggcctcggacttggccttctcgaattcaatgatggactggaagtattcgggagtcttggacaatagttttaaatatgtatcgacatcggagacatcgtagaactgatactctgataaaagcaccggaagctgggactgggtaccggtaagcggagccaggggctcgtcgtacagggagaatttggcctcctttaccgaagaagagagataatcttccagtacatcgtaagtgagtttgttcttagaggaaagttctttgcggtcgtaagactgaagcagcgccagcgcgttttccacagaagcgcatatggcggaagtatccgtgctgcaagcgccatatgtgatgggcgtatctttgatcccataggcagaaggatcttttaaggtatagtggagtgtgatcgtgcttccggatacctcctggcaaaacagggatcttgtatagttttcaaagcgttggtcttcatcctggtgaaaatgtcggaagactcctatagataggaaaatggcggctaagaagagagatactatgatggcagaacgtttttttgacatagtggtccttgaagtttttttacatttatatgccgataaaacaggtatcatgccgggaagccatagaattcctgccagtcctgtgataaaataaagaattaagagatggtatgggggtgacgttatgctgcacatatctatatgcgacgacgagcagatggaagcagagaggatacagggactgatcgagaaggaacttaaggaacagggaattgtctatcagatggacctgttcaaaaatggggaagaatttctcagtcagtatcagatccgcagcgaggaactgattttcctggatatagatatgtccgtcaagtcggggatagaagtaattgaagaattagaagagatcggaaagaacaaggatgtgatcctgattacaagccacgaccatctggtgctaaagtcccttacatatgggccgttccagatcatccgtaagatgagcatggcagaagatattccgaaggctgtcagacgatttctccgggagaagaagcaggaagatatgatcatagaatttgtgggaaaaggatttgtccggcatgtgaagaaggaagatatcgtctacctggaaaagtacaggcacaatattaccgttcatctaaagaacagcgagaatctgtctatccggggaactatgcaggattacgaaattatgcttgccaggcagggatttgtcaggattcatctgggatatatcgtaaatctgcggcaatgttattctatagaaaaaagcgaaatgatcatgacagacggagccaggcttcccatcagccgggaccgtcacaaggcagtcaaagagcaatttatgatcagcaggagaaattgatacgaatcagggtattctattcattggagaggctgcgaacatagcagagacaggaatcgtggtatattttctcgccaggtgctttcattggaaggagaagtatataagccccagaatgctctcggcaatactgtggatcatgctgtttgcgctgagcctgttaaatggatattttgtttacagccattatctggtgatcctggcggatatcgttctggtttttgcgtatacgggaatctttatgcaaggggacatccatctgaagctcctggggtgcctgctaccctttcttacggtgagcatcatcaacattttgtgatgcagaaattggcagtgttaaatttgcagccagcaggctgatgcttgcggcggctgtaggattcgcgttgatctgcctgtatattggctactccatcttctgcatcggtcagcagaacagccagttgctaagatatgagctgcagcagtttaagagtcgggagaatgaacgccagatccaggaagcagagcgtgccgtttcagcggctttttaagccgcagatattgagcgggcgcagagatttggtaaaattgtcataggaatgcgaatcattagagaagaaacggcattccagagggaggacgtaggatgaagaatatgaaaagatggatggcggcagcgcttgccgttatgctgtgcttaagcttggcagcctgcaaaggaaaggattttgacgcgaaaggctatgtaaagagcgtactggatgcgcactatcacggagagtataaggactacgcgaaatatctggatatctctgaggaagaggcaaaggccgatcttgacaaagatgtggatcagcagatcgatcaggaggttggcgctatcattgacctgggtgatgaaggcaaggccagatataaggagatgcttgtaaaagttgagaaattggcaaaatatgaagtgaaagatgtcaagaagcaggacaatggcaactacgtagtgaccgtggaagtagagccttccaacatataccagacgctggagcagaattccacttccgtgacggaagagaaagtgaatcagggactgaccccgtcagacccggcagtatttgctgatatcctggttgaaagcatccagaagagcattgatggcaatacttatggagatgcgacgacggtccaggtaaacgtgactaaggatgacaacggcgcctatggcctggaggaatccgaagtgcagaaactggcagacgcattattcccacaatagagaaaagaatatgtgacgataaccaaaaggatatttcccggacttgtgctatgggagatatcctttttcattttaccgttaatggcctttatattagcagaataggggatgaactgaggatatcgcggaatggaaccagaattcatcagcaagatattccgtccttttgagcaggagagcgcggatattattaagaaatatggaggctcccgccttggcatggcaattgccgatcagatggtgcgcctgatgggcggcgagatcgtcatagacaattgaaaccatgcgttctcacttaaagtataactggcagcagaatcactctcttactgagtttcgggaaggagtttgggacacaatcagacataaggttggagacaaaagcagttttatggtatgatgaagaatacgaataagggagaactgcattggctttatggtgaccctgggaaaggacgagcgggcaagatttgaagccgaccgaagcgaatattctgaaagcgaccagaaggtttacgatgactcaaaaacctatcatgatgggaaatggatgatgtttgagcctgttgacacatatttgtttggcattgatttacattaagcaagtgagcgatcagggcaatatgaaaggaaattcgacattaccgttgctattatttggtcataagtgtattatttggtcataagtgtattgactgctcagtggaaatttacttggattataggggttggatatgccgtgtattgtttccttgaaagttaaatccacacccgagtgcaatgataaatcaataataagtatgtgcggaggataaaaaatgaaaagagaattgggaatcgcccgttgtggtttagcttgctgcctgtgttcagaaaactgttccggctgcaattcaggagaatgcccggacaaggaatggtgtgaaaacaggaaatgttctctttccaaaagcatagagcattgttatgaatgcgaagaagaatgcagaaaaggcctgttagccaaaatcaagccctatggattcacagcattcgtgaaaaaatatggcgagaaagagctattggattgtcttgaacgaaatgaggcaaacggaattgtctatcatcgtaacggtataacaggtgattacgatgattttgatgatgtagaaacgcttatagattttataaaaacaggcgaaaaataacttccgatttgtcggataaaccttattagtgatcagcaatcagaaggagaataggtttatgaatgaaaagtttccgcaagaagcgaaaaagataatagatgaaagatttggacaagatacattactgtcacttgccactacggacccaaacattcggtatgacatagatttctccggtaactgaagactgttgaagtccaagatggatgattttggaggaggcgaagaagatggtttaataggctatcggggaagcgaaggcgagtgtggaagaattgcagataacttgaaagatttttgaggaaaacgctcaagaaaatgatttcgatttgtgtgaagcgcaacaagtttgatagatgaatacctctatttccgtttatcgagtagtcagggcaaggagggagtgcagtgtttctgggaatcatccagcggctatctgtttaccggaaaccgggtttacaaggacgctttatttgcctattatccgtcaacgaacccggagtcatactttgattctcttgaaaagatttcggaacttccggtcgaaaaggttttccggggcatcatagtttagtattcagccggagattttaagcagattgagaaatgcgttcaggcagatgcgggaagatggtaaattatatcacggtagcggcacatttgattatggggagtgggcggtatggttataaagagaatgaatatcgtttgtctgtgtgctatgcaaaaagttttgtcagataaagaacagctaaaaagagattgaaaggagcatttatatgaagtatgtatgtacggttatatcagtagcggacatcggcaccgcaagaaagttttatgaggaactgttcgggttagaagtctatcaggattacggaaagaatatcgctttttcctgcggtctggcattacagcaggattttgactggctggtaagtataccaaaagaaaaggtgttgaagaaatccaacaatgcagaagttgtttttgaggaacaggatttcgatggtttcctgaataggctgaaagagtacccggagattgaatatctgggagaagtcatagagcacagctgggggcagcgtgtgatccggttctacgacttggacgggcatctcatagaggttggcgaggatatgaaaatggtggtcaggcggtttctgaatactggcatgacaatggaagaagtgtccgaaagaatggacgtttccattgaggatttaggaaaactgctggatagatgagagggtttggatgcttctttgctggcaattggcatatacgctcaaaatgagttacaagatggattacagtgataaatccactttcaactggatctccgttctcagactgcccgatttcgtcaaaaaagaggattgtgattgggtcgttgcagcagccacaaaaaagaaagggatagactgctccatcgcggagttttgacgattgacgaaggcttgtgcgttcagatcatgcacattggaccctatgatactgggtcggaatcggtggcgttgatggatgcgttccttgcagagaacgggtatgcaaatgatatggcggatgggcggctgcatcatgagatctacttatcaaaccaaaaaagagtgtttcggaaaagatgaaaacggtaatccggcatccgataaaacgagcctgatgatattgatagctgaaaaacataaattagaaatttgtggaggatgacgatgataggattgatagtagcacgctccaaaaataatgtcatagggaaaaatgggaaaataccatggaaaatcaagggagagcagaaacaattcagagagttgacaacaaataaagctgttattatgggacgaaaatcttacaatgaaattggacatccacttgcaaacagattaaatattatagtatctaatacagcaaattatacaggagaaaacttgataacagttcattctctcaatgaagcaattcaagtcgctggaaataaagatatctttgtgatcggtggatatagtttatataaagaagcgttgccaattgtagataaaatgtatattacagaaattgatatagaggtgtcaaatggggatgtctttttcccacaattcaatatagataattttgaattgtctattggagaaacatttggaaatgatattaaatatactcgcacgctttatactagaaaaagatggattccaaattgcgtggcaaagaatatgcttgaatcatctggataagctacatacgactgaattgagtgtataatgaaaaatcagagagtgttttattatcatatgacatcattggacaaactctgttccattgcagaacagggattgatacccaaaaacgaacgcaacggaaaacttattggaggagaaaatctgaaagtcttttttctgaggggttgaaggtgcaattgctctgtttgtggactttcaaattgtctacgataaaatcaaaacgaaacagatgactgtagcagacaaggatattgaaaaccggttgttacagtctctaatcttttttatgttttaaatatccttttgtatatttacaggaatcctgattttcctatttacttttgctataggttgtatacttgtgttcccggtaactttgactgcggtgtttttcataaagggactaaaagtagccgggcatgaaggaatgaaacgatccaacttattgtcattgccgttctctatcttgctatatgtatatttggcagcctggccaatgattggaaatctaaacaagaatacattaggaacaatcatttatgtaattattggttttcatcggtgtatgtattttcattaatggccatgtattcactctctgctattctaaatcttgttcatttgaaaaagaaatgcagattatattgttgttcttggatgtggagtaattggaaagcgggttacatcgctacttgcagcccggattgaaagaggaataggattgctgaagtggaatccaaacgctgtattaattatgtccggtggacaaggctctggcgaagatattccagaaagcgaggctatggccgcatatgaagtagataaaggagtggatgcagataggattataaaggaacaaaaatctgtatcaacgaaagaaaatctgttgttttcaaggaagttgacggagaaaaaagccctaaaattaccatcgttacaacggcgtatcatgtgttcagagcattgattctggcaaagcggcaaggaataaaatgtgtgggttttgggacaaagacaatttgaacgattgggtgaatgaagaaaaaatcgtgcctattatccaaatgataactgcaaggacagggctgcttctctccgaaagcaaattattcaagaaagaggtaaatcgaaatggacttacgaaatcataagaaaagagccctggctagcttcattgaaaagatgaacagggagagaaagaaattaaaactgcaaaggcggcttcgcactcgctattgcagatggagcctgtagacggcgcttgcggatggcgtttacagatggcgcataaagcaaaagatataggcgcaatcccttgacagttcgggctatgttatgctacgatttttagtacgaatcatatgcaaacgcagtgacggagagagtacgtggtaggaggtcctacagagaagtccccggtttccggacaggaacaggctgagagggatgggcggagtacggcggaagatggcttccaagcggtgcagtcgataggctacatatagttagttcaggtaggctgcaaagggtccgccctttaacgcggtagggtgtagtttaatgcacctgctaaggcttcctgccgcgaggcggaagcgaacagaagtggtatcacgggatagtctcgtcttctccgatttttcttatcaagaagaatcggagatttttttcttcatggagaacttcagcgtgtgcatatttcagcaatgaggacaaggagaggattagaaatggataaacagaagtactatattacgacggccattgcttatacatcggggaagccgcacattgggaacacgtatgagatcgtgcttgcggatgcgatcgccagatacaaaaggagccaggggtacgatgtattcttccagaccggcacggacgagcatgggcagaagattgagttaaaggcagaagaggcgggggttacgccaaaggaatttgtagatggagttgccggacagattcagacgatctgggatctgatgaatacttcctatgacaaatttatccgtactacggatgctgaccatgaaaagcaggttcagaagattttcaagaagttatatgaccagggggacatttacaagggatattacgaaggaatgtactgcacgccctgcgagtccttctttaccgagtcccagctggtggacggcaagtgtcctgactgcggccgcgaagtgcagccggcaaaggaagaggcgtacttcttcaagatgagcaagtatgcggatcgtctgatcgagcatattaacagccatccggaatttatccagccggtatcaagaaagaatgagatgatgaacaacttccttcttccgggactgcaggatctatgcgtatccaggacgtccttcaaatggggaatcccggtagacttcgatccggagcatgtggtatacgtgtggctggacgcgctgaccaactacatcacgggcataggctatgactgcggcggcgagagcacagagcagttcaagaaggactggccggcggatctgcacctgatcggaaaggatattatccgcttccataccatttactggccgatctttttgatggcgctggatctgccgcttccaaagcagatattcggccatccgtggctgctgcaaggcgacggcaagatgagcaagtccaagggaaacgtgctctatgcggatgaactggtagacttcttcggcgtagacgcggtgcgctatttcgtgcttcatgagatgccatttgaaaatgacggcgtgatctcctgggaacttatggtggagcgcatgaattcggatcttgccaacaccttgggcaatctggtgaaccggaccatctccatgaccaacaagtattttgacggcgttgtcacggataagaaagtggcggatgacgaggacgcaaaggccgtggacgcagaccttagggcagttacagagaatacgccaaaggccgtggaggccaagatggatgaactgcgggtagcggatgccatcacagagatcttcaatctgttcaaacgctgtaacaagtatatagatgagaccatgccatgggcgctggccaaagatgaggacaagaaagaccgtctggagaccgtgctttacaacctgctggaaagcatcaaggcaggcgccgtgctgctggaatccttcatgccggacacttccgccaagattctggcacagctgggcgacggtaaagtaaccgataagccggaaattctctttgcaagactcgatgtggaggaagtcatgaagaaggtggaagaactgcacccgccggttgctgaagaagcagcagaggaagaagtcatcgatatcgagacaaagccggagatcacatttgaagaattcggcaagatgcagttccaggtgggcgagatcatcgcctgcgaggaagtgaagaagtcaaagaaactgctgtgctcccaggtaaaagtgggaagccaggtgaagcagatcgtatcaggaatcaaggcacattactccgcagaagaaatggtcggcaagaaagtcatggtgcttgtgaaccttaagccggcaaaactggcaggagtattatccgaaggaatgctgctgtgcgcggaagacgcagaaggcaatctggcgctgatgaccccggaaaaagaaatgccggctggcgcacagatcagttaaaatcttcaaacaataacaaaaagggacaggatatgatgcaaagtgacacgtaacactttttaaaagtgttacgtgtcaaattaacaaaggagatgaagaatatggataaaatcagaattggtatcgtgggatatggcaacattggcagaggcgtggaaaaggccatcgcccgcaacgaggatatggaactgacggctgtatttacgagaagagacccttcaggcgtaaagattgcaaccgagggcgttgaggtaaagcatatcgatgacatgttatccatgaaggataaaattgatgtgatgatgctctgcggaggctctgctacagatcttccggttatggggcctcagatcgtccagaattttaatacaattgacagctttgatacccatgccagaatcccggaatatttcgcaaatgtggataaggcggcaaaatccggcggacatgtaggaatcatctcggttggctgggatccgggaatgttctcgctaaaccgtctgtatgcagagtccatcctggtacagggaagcacctatacattctggggaaaaggcgtaagccaggggcattctgacgccatccggcgcgtggaaggcgtaaagaatgccatccagtataccgtgccggttgaggatgccgtggaacgcgtaaggagcggaagcgagccgcagcttaccacaagggacaagcatctgcgggaatgctatgtagtgccggaagaaggggcagaccttaagaagattgaagaggccatcaagacaatgccgaattattttgatgattatgatacgacggttacctttatcacagaggaagaactgaaagagaaccacagcaagatgcctcacggaggattcgtaatccgaagcggcgagacggggacggatggaagcaaacatattatcgagtattccctgaaactggattctaatcccgaattcacggccagcgtgctcgtgtgctatgcaagagcggcttatcgtctggcaaaggcgggcgagacaggggcaaagacggtatttgatattgcgccggcacttttatctatgaagacgccggaacagctgcgcgccgagttgctgtaacaacaggtttggaggagacatgatattcgagacacatgcgcattatgatgacgagcaatttaatgaagaccgcagggaactcctggaatctatggcagcgggaggggtaggcacgatcgtaaatgtgagcgctacttatgaatcctgccaaaaggtggtggatatggtccgggaatatcccttcatgtatgcctccgtgggcgtccatccggacaatgtaggcagcctgaatgaagagacgtttgcaagcatgaaggacttattccaaaaggataaggtagtggcagttggagaaatcggccttgactattattgggacaacgagtcccatgagacgcagaagaagtggtttgtccgccagctggatctggccagggaactggggcttccggtcctgatccacagccgggacgcagcggcggatacgatgcagattatgaaagagcacgcacaagggcttaaaggcgtgatccactgctactcctactccaaggaaatggcaaaggagtatgtgaagatgggcttctacattggagtgggcggagtggttacgttcaaaaatggcagaaggcttaaagagacggtggaagccataccgcttaaagccattcttcttgaaacagactgcccataccttgcacctgagccataccgcggcaaacgcaatcactctatgtatatcaaatatgtggcagaggagattgcgaggctgaagggaacgacttatgaagaggtcgtggcgcagactgaaaagaatgccaggaaaatgtatcgcttataaattttataaaacccagaacgcggatggctctttcagccatccgtttcacagtaaacggcgggtttaagaaccggcagtcgtctctgaaaattcatattttcttaatattattttattctttttgtatatcatataagcccagagtattgtataataatgaatactacacaggactgggggagtaaagtttcatgagcaggccgactttggggaatccgcagaataccatcgagatcttacagaaatatcagtttacatttcagaaaaaattcggtcagaacttcttaattgatacccacgtattagataaaattatccgtgccgctgacatcggcaaagacgatatggtgctggagatagggccaggaattggcacgatgacgcagtatctggcagaagcggcgggaaaggtgatcgcggtagagattgacaagaatctgatacccattctaacagatacgctaagcgggtatgagaatgtacagattatcaatgaggatgtgctaaaactggatatacaaaggcttgtggaggaagaaaatgccgggcggccgatcaaggtcgtggccaacctcccttactatataacaactccgattattatggggctatttgagagccatgtgccgctttacagcgttaccgtcatggtacagaaggaagtagcggaccgtatgcagacggggccgggcaacaaggattacggagcactgtcactggctgtccagtattatgccgagccttatattgtggcgaatgtgccgcccaactgctttatgccgaggccgaaagtggggtctgcggtgatacggcttacacggtatgagaagccgccggtggaagtagaagatgaaagactgctatttgatataatccgggcgtcctttaaccagagacgcaagacgctggcgaatgggctgaataactcggacaggctggatgttcccaaggaggcgatcacagaagccatccagcagctgggaaaggggccgtccgtcaggggagagacgttgacgcttgaagaatttgctaagttaagcaatagtttgtggcaatatatgcagtaaggctattgactttactataataacctgaaatacaacaacgaacagaaaggatgatgactatgccgacaaaaagagagtatgcattatttgagatcacaccggagattgagcatttcgcccaactttgcgaagacaataatgcaattgataaggaactgtacacgaagtatgaggtaaaaaggggcctgcgtgatgtgaatggcaagggcgtcctggccggactgaccaacatatctgacgtatgcgccaccaagatcgaagatggcaaggaagtcccgtgtgcaggcaacttatactaccgtggctacaatattaaggatctggtacagggatttttaaaagatgaacattacggattcgaagagatcgcatatcttttactgttcggagaactgccgaatgagaaggaactgtcgatgttccatgagacgctggtagaacggcgcacacttccgcctacgtttgtaagggacgtaatcatgaaggcgccaagccgggacatgatgaacagcctgtcccgctccatattgaatctgtatacttatgatgcaaaggcggacgacacatccataccgaatgtgctgcgccaatgcctgaatctgatcagccagtttccgatgctgatggtctatggataccatgcatataattaccgcatgggcgatgatctgtttatctatgcgccgtccccggaactgtcaacagcagagaatatcctgatgatgctcagggaggaccgaaagtatacgaagctggaggcaaagatcctggacatggcccttgtgcttcacatggatcatggcggcggaaataactccacgtttaccacccatgttgtcacctcatccggcaccgatacatattccactatcgccgcggccatggcatcccttaaggggccaaagcatggcggcgctaacatcaaggtaacccagatgttcgaagatatgaaggaaaaactttccgactgggaagacaaggatgaagtgcgcaagtatctcaatgacctgctggagaaaaaagcatttgacaagaagggcctgatctatggaatgggacatgcgatctactccgtatctgacccaagagcggatatcttcaaggtgttcgtaaagcagctggcaaaggaaaagggatgcgagaaagagtatgccctgtatgagatggtcgagcatatggctccggaagtaatcgcagagaagcgcaagatatataaaggcgttaatgccaatgtagacttttacagcggcctggtatacagcatgctggatctgccgccgtcattgtacacgccgatattcgcggcggcgcgtattgtaggatggagcgcccacaggctggaagagttaaagaacgtagataagatcatacgtccggcatataagccgctggctgcccacagagattatattagaatggaagacagataaatggaaaatgagttttactacccctccagagactccaaaaccaagatccacgcggtggaatgggttccggaaggtgagataaaaggcgtgctgcagatttgccacggcatggtggaatatataaaaagataccgggaactgggcgaatatctggcggaacgcgggtattacgtgaccggccatgaccatctggggcatgggcagtccgtacagaatgaatccgattatggatattttaatgagacaaaaggcaaccagtatgtaataggcgacatacataagttgagagagattacaatgaagaaatacccggatgtgccttattacatgctgggccacagcatgggctccttcctgctgcggcagtaccttaccctatatggaaaagggctttctggcgccattgttatgggcaccggctaccagggtgcgctgattctctcggcaggacagtgcatttgccgcattattgcaacattcaagggatggaaataccggagcaagttcgtagaccggcttagtttcggcggatacaataagagattcgagccgggagagacttccaaggaatggattacctcggataaggaaaggtgccggaagtatgcggaagatcccctgtgttcctttatgtttactctgggcgcatattaccagatgtttgaagggatgaaggtgctgaccaagagcgaaagcatggaacgcattcccaaaggccttccgatgttattcgtgtccggcaaggacgatccggtaggcgggtttggcaaaggagtcgaaaaggtctttgccaaatataaggaggccggaatgcagaagttgtccctgcgtttttatgaaggcgaccggcatgagatattgaacgagacagaccgggaacaggtatatgaagacctgttccaatggattgaagatcagaaaatgacgcagcaaaattaggacgctatacttaagaaaagtattcggataatgattacatgaatatgaaagatatctggaatactaaaaataaatcatatggagggattacacatgaggttaaaagacaaagtgattctggttacagcatccaccagaggcattggcctggctatcgctcaggcatgtgcgaaagaaggagccaaagtctacatgggcgccaggaatctggaacgcgccaaggcacgggctgacgagatgaatgcggcaggcggcaatgtaaagtatgtttacaatgatgcgacaaaagaagagacatacgtgacgatgattgaggaaatcatcgagcaagaagggcgcatagacgtgcttgtaaataatttcggctcatcaaatcccaagaaagatcttggaattgccaatacagatccggaggtattcatcaagacggtaaatatcaacctaaagagcgtatttatcgcaagccagacggctgttaagtatatggcggaaaatggaggtggaagcatcatcaatatctcatccgtaggaggcctgataccagatatctctcagattgcctatggaaccagcaaagcggcaatcaactatctgacgaaactgatagccgtacacgaggcaaggcataacatcagatgcaatgcggtacttccaggaatgacggcaacagatgcggtgcaggataatctgacggatgacttccgaaacttcttcttgaagcatacgccaattcagcgtatggggctcccggaagagatcgcggcagccgtagtatacttcgcaagcgatgatgccgcatataccacaggacagattcttaccgtatctggcggtttcggattggcaacgccgatattcggagatctgtctgaacgctcagatgcccgcgggtagaatttcatgagttaacttaatcaaaagcagaatcaggaaaagagacagccgggagcggctgtctcttttatctatagtgcgcctagcggcgcacgtttccaatgggtgaaagtccctaatctgccctagtagagggaaggatatagccgaacaccaagggtgtcctatttataacagagattataattaacgtgaggggaatctgaaggaaggtgtacgttatgaaaagctacacattatgcaaagtaggcgatagaaaaccttataaataaaggattctttggttgatttacttttcataatccatcacgatttaagtgtatttttatcaaagcacttaaggaggaacacaaggtggaaaatttaactttgcagcaactaatcaaccaaaccaaggaggcactcattgaagctggtgcatccaactattaccaaaacgtatttaaaactcttacaaagcaacttttgctctacgcaaaagaacataacacggaatctttcagtatggattttggattgcagtttttagaagaccattattccatgtcatctaaaatcgagcagaagaaatggtgtgcaacctattcccgttgtattaatgctttagcagaataccaacattcaggaaatgtgactctatatcttgttatggataaaagagcatacacttttcctgacagtttcaaagacagtgctgagtcctacctctcccatcgagagaaaacaggaatcattaaaaaatcaaataaggttttcagtttatatctggaaagattttttgcatttttgaaaaaggagaacatatcttctctggatgcactgtctcttaaagatgttttggatttcatggcatcactgagctgctatgaaaaaccaaccgtaaatcatacaatgcgggcagttcgatattatctgaaatactgctatgagaatggctttatgaatacggagatgttctccaagcttcccaatccccattacaacaggcaaagccgtttaccttcatcatatactgcaaacgaagtaaaaaaacttcttgattcgattgatcttggaaacccttgtggaatccgtgattatgcaatcattcttctgattgcaagacgcgggctgcgtagcagtgatgtggccaatctcagattttccaatatcgattgggaaaaagagattatccgtttaactcaggtaaaaacaggaaatccgttggaacttcctctgcttgaagatgtgggtgaagcaatcatcaattatctgaagaacgcaaggccaaaaactgattcagatcatgtttttgtgaggcaagttccaccgtatacgaattttaatccgggtgcagtcggtgcccttgtaagagttcatctccagaaatcagggattcatcttgaagggaaaaagaaaggttcccatacgcttcgccacagccttgcaagtcgtctgttagagcatgagatccctcttccggtcatttcagaaatcttgggacatacaactaccgaaaccacgatgacataccttcgtattgatatcgccgaactcagaaagtgtgcattggaggtggcaatctaacatgacaagaatcagaaaatcaccaacaatgacaggaccatttgctgaggtcgctcaggaattcattcaatacaaaagaagtgccggttttaaatacgcagatgaaccgaaatgcttatcacgattttgtcgtttcagtgaagaactgggtatcacagaaatagaaatatcccgttctcttgcagaaaaatggattgcaccaagagaaagtgaatctgaaaaaagccgttcacaccgtattacctgtataagacagtttgctatctacctgaataatcttggctatgatgcttatatagtaccagaagtaaaaggcttgaatcataattcatttgttccctatatatttacacatgaacagatagcatctgtgataaaagcagctgatgaaacagaacctcgggaggttgcaagaaacatgcatctggcgctacctgtgatatttcgtattctctatggctgtggacttcgtgtatctgaagttgttggtcttcgctataaggatgtaaatctcgaagatgggattcttacaatccgtgaagccaaaactgaccgtgaccgatatatcccattatcagattccgtgaaagaagcttgtatatcctatgcagataaaatctggtgggaaaaagacagtgactttttctttcttgcccctgacaagaccatgatcagtcccatgactgtatatcaaagatatcgtagatatctggaagttgcaggtatttcacatggtggaaaagggcaaggacctcgtctgcatgatattcgtcacacatttgcagttcacgttttgcaaaagtggatcaaagaagaagcagatctgactgctatgctcccgattctctccacatatatgggacacaaaacagtacgctcaaccgcacagtatctgcggctgacagccgaagtttatcctgatctgatgaaaagagtggaaaaatcctgtgcatatgtcatcccggaggtatgccatgaaggaaactgattttgctagatatctgacacagttcctgtcaacatatcttccgaggcaggttgggagtaaacgaaacactcagttagcatacagagattcattctctttatttttaagatactgtagagatcaggagaatctttcacctgaaaagctgacgattgccaaagtagatcgagaattaatacttcgtttccttcaatggctagaagatgagcgcaactgcaaagcagcgacaagaaatcagcgtctagccgcaatccattcatttttcagttttttaatggtggaagaaccacagtatatgcagcaaagtcagaaaatcctggctatcccgatgaaaaaaacggacaagcctccgctcatgtatcttcctctggatagcattaaggggctgttggaacagcctgacagggccacaatccaaggaaaaagagatgctgtgctactgtcacttttatacgacacaggtgcaagagttcaagaacttgtagatttaaaagtgtgtgatattgctttgaatgatactgttaccatcatactgacaggaaaaggtggtaaaagccgtattgttccagtcatgaaaccaaccggtgaattattgaaacaatatatggaaggttctggtttgacttcgcctgtatatggacgcaatccattattcactaatcgtggtaacaaaccactgacaagagctggtgtgacatatattttgaaaaagtatgcagcacaggctcaggcaatgggagtaaaagatatctctgatgagattacacctcattggctgagacatagcaaagcaatgcatctgcttcaatctggtgtctatcttgtttatatcagagatttactgggtcattctgacatttcaacaactgaaatctacgcacgggcagatgaaaagatgaaacggaaagctttgatggaggcttacaacagcccagcatctgatgaattaccgacatggaaaaaggacaaagaccttcttgattggttgaaatcgctgtaaggagtttttccgaattatgcaaagtctaaagagcccgtacactttatataatcaacaaagtgtgggctccactttgcataataacttacttttcataacctgttttatgcgaagcttcgcataatgtacgcaaatctctggtctgacgaacagaaatcacatcaggctacagttaaggataaggttgctattcaaaccaaagtccaataactactcggaattagctgtggtaaatgtggcagatggatagagagaaggaagcgtgtggtacctagggaggtcttgtcagcaagcggaaacggagtatgaaacttgtagtaacaacgaatggcaagaagtcagcagaggtcatagtaccattgtggttgcaaacataatgggaaggactgaactttaggagatgtgagtaaatgaatgtaaccaaagatggatacttaatgaagttattgcagaaaagataattgaaattcatggtgagcatcccgatatgggatataggctcatcagggatacgctggagcatgattataatataagcgtcaatgataaacgggtctcgcgggtatgccgtaagaaaaagattcagtctcatataacacacaaatataattgttgcacaaagccagccaccgatccggcttatattgccgaaaatatactaaatcgagattttaagtcagatatacctaatgaaaaatggcttacggatgtgtctacttccaaagcctttcgacagaagataattgatgccggaatgatataaagaatgtcaagagttgccaaatgtattgataatgggccaatggaagggttctgggtaatcatgaaacgtgaaatgtatcatggaaaaaagtataaaaccaaagatgaattaatagaagccattgaagaatatatagattattacacgaataagcgggtgcagagaaatctctgcgttttaacgccacaagagatttatgaaaagcgctactgaaagtagcataaaaactgagtataatgccgggcagaaaaatttttgttttttaattgtctacttgacggggagcacaccagtataagttagacataagcctgcctagactgccaagtacaaaggtaggcttatttattttcgcttgttgttcctatctatgtgggcaagcagtgtgagtataaaaataccaaaagaaatcatcaaagagattgcttcaaatacagtcattcacaccccccgtcttatgtagttcccatgacgggataaatgccgattggcattcataccgattggtacttatgaagtgagggaggcatttatgcagattcgcatatgaaataacttattaatgcctatttatgcaaataaaaggtatacggtagaccatgagtatcagctcattttatgaccgccgtttccggcggtcggtttacacgtttgttgtttttgttttgcttatgcagatttccggcagctgctcagaccatggaagcagttcttccataaaacaataatccgtatcctcctgatggtctttcatcacggttaggatatattccagatagcggaagggatttagatgattcgcctttgctgtttccgtgatactgtagatgatcgcactggattgtgcaccgtcaatactgtcgatcagcttccatgcatgtttgtgcaggcagaagctgcgcagagccccttccgttgcgttattatcaagcgggacttcaccatcatccaggaatacttttaatgcctcttcctgattgatgcagtagttgatcccttccagagttttacccttggtaaggcgaccggagaactggatttcttttgcccacacaaagaaagcctccaccagaggtttgagattgatctgccgctgttttttacggtcatccggcttcagatcagcaagctggttgtccagatggtagatggcgccaatccgcttgattgcctcgtaagcgatcgtatctttggctgcctgatgatctttttttggcaatgccttcagggcatcggcaaaataccttctcgcatgggtccagcaccctgcgaaaacgatggtttcgctttcccggtccagcttccggtaggcggagtatccgtcacagacaacagtgcctgtaaatcctttcaggaattcccgcggatggtctgctttccgggtcttctggtattcatacaggataatggggggatcactatatccctttcccgtccggtagacccacatgtaactcttactgtttgccgggcgcccatccttcgataccttaaccggagtctcgtcggcctgcagcacatggaaatggtacatcctgttatgaaggtaatcataaagcggtcccagataccggtccgcacactggatcatccagttcgccattacctgccgggagatatggatgtcgtttctcaggaactcctggctgatccggtataaaggcagtccattgacatacttggcattcatgatgcttgcacccagagacggtgtcagaatgctgttgcggagcaattcccttggtcggtccgctttgacaatcgtctgattatcttttccggcatacacggccacatgatgttcttccaccgtgtagactgccggctgaacccggactcttttataaacttcatccgggagctgcttccatccaacggagccaaaaatttcctgcagctttgcttctggaatggtatgagggatcacttccacaggaagatccttaagatctgcctcgcgctttccttttttcgtccggcgcgtgacctggatcacatcttcttccctaggttcgacaacataaagcgtctcagtcaaagcttccgcttcgttaaagatgagctccagttccaattgtccggcgataacgtccagcttttcggaagaacgcccataacgatgattgtttgcagatgcgatctgctcaatcaggcgttccatgtttgtattcagttgggtaagctggttctgcatggacaggatcactgccacgagtgtttccctgctgaaactgttcagttcttccggtgagtagatcttctgcatgttcggtgctcctttgttttactggaactattgtaccgcaaaccaaaagaaaaagcgaacgggataataaagaaggttcgtcattctcaccaaaggataaacactctgaaaagccgaaaaaactattagttttttcagtttttcagagtacttatccacacagcagcttatagctgtgaagtactcttgattgaatgatatgagatctggctgtggataacttccgtcgcgtctgtggcaggagatacaaaaagattttttattttctccgttttgcacaacatttcacagaagatcgctgggctgcacttcctggattgggtgtctggatacgatctccagtccctgcatcagtgcacggtattgctcctgggtgatctccagtgcttcttcttttgtgcggggccagctgaagccgccaagttccagtcttttgtaaaggagaaggaatccgtctccttcccatacgagccccttgatgcggtcactgcgtcttccgcaaaacaggaagaggatatccttttcatatggatccagctggaagttaaatttcacaatagatgccagcccgtcgattccgcgccgcaaatccttatagccggcagcaacgtaaaccttccggaagccggatgcgttattcagcatgaagaattcctcctacccgggagaacagttctgatgaggctgaattggaaatctccagaacaagattccctttccggatcaccagatctggacggaaaacaggtgatgcgtccggtgacaaggcaggaagtttgatttcagcgaaagatacggactgctgaacagcagacaattgttttgtctctgcaactgcaggcaatgatggattctgagatgcttcataagcttcccggcgcaggatgcgctgccagtaaaaaaactgcttctcagaaatcccgtttgcccgacaccaggcggtttttgacatcccgctattcatacattcattcaggatcttggtccagtccagtgctctgcacggacctgatgtgtgattttatccatggtactaactcctttaaaaaacttgtagttttctggagttattatctcatggagcgaggaaactagcacggtactcatggtctaccgtatacgacttaacaacaacgaaaacccgctagccttacggctagcgggttttcgttgttgttatagttatctaaaggaatgagagtaaagtgcgcaccgggccttccccggtgttttactttatgaggggggagatagttgagtgttgatcaactatctgatatttattataaaggctaattgtgtccaaagtgttttcattctctaaaagaaaaagaaaagttcttaaaaacatattaagaaggagttaagcaatgcttaggaaggcgtctaagaacagacaagaggccatcagacaagcatgcccgaatacaaatgaagtgactttgaaaatgtggagtgttacaatggaagagataatgaggggctgtgatttataattgatgaattgagagaaaggacaagagatatgaaatataaagtgaatgaccaggaacttaatgcttcaatgtttattacgtttgtgaatagggtatggccaggggattatgatgtggataagacgcaggctgcgttatcgagaacattgaatatcactgcttacgatgaaaaggaacttgtgggctgtctgcggattctttcagacggctattattttggaaccattacagagctgcttgttcttccaaaatatcagaagcagggaattgggagcaggcttctaacgcttgccaaagataacaccccgaccatgctgtatttcggcgcacatccaggagcaaaaggattttatgaaaaaaacggatgtcagaagagtctgcaatcctatttgatagataaggaagactaatttttgaaaggcattttagattatgaaagaacataggtatgaggttattgctggcatccgttattgctgcccgcactacatcattaattagaaaaagtcaagtgtaatatttctttggaaaactatttcaccgagatttgaccgaaagatattccggacaatccccaagacagcaaaaatccgtcaaccacgcggggtgacggattcctgttgttatagttatctaaaggaatgagagtaaagtgcgcaccgggtgttcccggtgttttactttatgaggggggagatagtgagtgctaatcaactatctgggtattagtataaaagaaaaatatgtccaaagtatgttgaatctctaaaagaaaaagaaaaattcttaagaaggacttaagaacttgggaagaaaacctaaaccagcatttctgcggcttctttctgccttaaatgagcagtaagaatatctaaaaattcactggatgtaggctgcgagtcaagaggatgcaaggcaatttcctgaagcagacggcggtttcctctttcccaacagactctgataacggttcttatatctcgttccacgctgctgcttgtagtatgatagttttttgcaatctgaggatataataacttgctcacggacagaaggtagtcttcgtctctcaaacatagtttcaccccatagttcagatatcggtatccacggtaggttgcgccgatgccaagagcacgtataagatattcgatttctagttcactcatgtgattttcctcatcgaatgccttacattgaaaaacaaatatgctatgtgcttctattatataggatatttctccgatatgttgcgacttagacgcaataagtaagagttcgactcatttcgacatatccagggtaacaaaaacagaaaaatcaacatatagaatataaaaaagaaggtggacattatgagcattcatggaatagatgtaagcggatttcagggcagcatagactgggaggccgtaagagcgagccaaatacagtttgccatgatccgggccggctatggagaggggaccgtggatcaggagttcaggagaaatgccagccagtgcaactaggttgggctgccgttcggagtgtactggttttcctatgcgtataccccggaaatggccaggcaggaggctaacgaccgtggcagaacgacagcgcctgaacggcattcgcaatcccaacctgatctatgcgggaactacgatcagagtatgagaggaagaagagaaaattggcccggaatccagattctggaagccgggccttttttcattatatcttaagaaaattcccagattgctcttaaaaaatccctgctattcttgtatagtataagggaggtgatgaaaatgtctaaaatattagtatgtgatgatgataaggaaatcgtagaggccatcgatatatatctgtcccaggaagggtatgaagtattaaaggcatatgatggggaagaagcactgaaggtattgggcaaggagaagatagaccttctggtaatcgacgtcatgatgccaaaactggacgggatcagagccacccttaagatccgggaagccaacaatatgccaatcattattctctctgcaaaatccgaagacgcagataagatccttggccttaacgtaggtgcggatgattatgtgacgaagcctttcaatccattggaactggttgcaagagtcaagtcgcagcttcggcgttatacgcagcttggcagtactgcgaatcataaaaatgaagcggtctatgaagttggaggcctgtcgatcaacgatgacttaaaggaagtaacggtggatggcgggccagtgaaacttacgccgatcgaatataatattctgctactgctggtaaagaatcaagggaaagtcttctctatagaccagatctatgaaagtatatggaatgaggacgccattggcgtagataatacggtggcggtacatatcaggcatatacgtgaaaaaatagagatcaatccaaaagagccccgttacctgaaggtagtatggggagtcggatataaggtggagaagctttagaagggagtttatatgaagcaacaatggtacaaatcaaatgttgcaaaagggatattgatcgtgacccagcatatactgctggtcgtaatgataaccagttttctgtggatgatgtcctacccggcccttagaggggaattgtttgtaggaaagcctgccaagaaatacgaggacaccgtaagttttggcaatcagttgaacaatatcagccatgacgtggtaaacggagtcgaactgcgcaagaagtttgagacggatggcatctatgatccaatgagggttgtcgatattgagaattattatttgaattctaagatcagcgatgaagacgcaagcggcctggcctattctttgcaggacttatataactggggagaggaactgtatgacaaaggcgagataagttatgactcgggtcttgagatggcatatacttctgaggagacgccgggcgatgataatatcatagtgtgcaagcggtcaaacgatacgtatcactattactattatagtgaatttaaagatctgatcgacagcgacatgctacggttcgttataagcaatgaaagcgaaggaatgtccggagaggacattttggatgaacttcataatggaagccgcaatgagggagaaaaccgggggcagcagtttaaagggctgcaggacgcggaaggaagaattgaatatattgactgctggagttacgatggcacctggatggaagagaagtacccgccgcttggcgagaaaagtattattgatattgtgaataacaacccaaagtggaacggcaggctgaacgaagcctttgacatgctgcacagtactataaatgcggtgttcggcgaagtgtctgcctataatgaattggaagaattgtatcaggaaggagatacgaacctggcctatatgtatgtggatgaggacacagggcaggtatataccaaccgcaaggagtatgaggactattccaaggtggaagagaaccttaagaagatacgcggaatgggaaaatatacgattgtaagacccaaactggcggattttgagtcaaatcttaaagacacggatgcgacgcagtggagggatgcgatcaagtattctgtaggcggaaaaaattttgtatatgcggtaggggttgatacctcttatccgattcaggatgattttcatgcggagaatatcatgtatgaaaagtacggatctaatgctagaagcatagcaatcctcggggtttttgcggctatcctgttcataatattcatggtatggcttacaagcatagcgggaaggaatatgaaggatgaagaactgcatctgaactggttcgatcatattaagacagaactggcagctgtgatcatagggctgctttggggaattcctcttatgttggcttattccggaataccggtctcatcgtttaaagcttatgacgatggcagaacgctcgtctatcaggctgattatatatacaatgccctgccatatatgatggcaggaggaattatagcagcatatacctgcggcatgttcctgatcggataccttagcctggttcgccggattaaggccaggactctctggtcgaacagcgtgctgaaatggttcttcgggtttgtgggacagttattcaggaatctgcatgctatatggaaggttgtcttgctgtttggtgtgttcgctgtgattcattggattgcctatatcagtatgggagatggcatctggcttttcctggcactgacggtggaggctgtggcatttgtgttcctgatccggcagactattggcaggcagaggatcaagaagggaattgaaaagatatccggcggagaggtggattacaagattccgatatatggcctgggaaatgagcagagcgatattgcgcagcgagtcaactccatcggagaaggactggatgcggcgctggaagagagtatgaaaagcgagcgcctgaagacggacttgatcacgaatgtatcccatgatattaagacgccgcttacttctatcattaattatgtggaactcctgaagcaggagaattttgaagatccgaagattcagagatatctggaagtgctggaggctaaatcccaaaggcttaagaccctgacagaggatgtggtagaggcatccaaggtaagttccggcaatatcacgctggaatatatgaatattaatctcgtagagatgatccagcagaccagcggagagttcgaggagaagtttaaagcccgcaaccttaaggaggtcctgacgctgccggagcaagaagcaatcatcagagtggatggacgccggatgtggcgtgtgcttgagaatatctacaacaacgcggccaagtatgcgatggaaggaacccgtatatacgcggatctggaagtcagagacttatcagcggtattcaatctgaagaatgtatcggaacagcagctgaacattacggcagatgaactaactgagcggtttatacgcggcgatatctccagaagcacggaaggaagcggtctgggcctgtctattgccaagacgctcacacagatgcagggaggaaaattcgacctgtatgtggatggcgatctgttcagagtaacgatcacattccccatcgtattggcaaaggcagataacgagcctgcagatgacggacggataaatgacggacagacagaagcataatgctgcaaatgagtaaatatggacgcggcacttttcaaaagtgctgcgtcctacttgcgcttattgaaaaaaaacattacaataataatattatggatgaattaagaaaattattacaggaaaatctaaatatagagtttatctcagcagttctgagcaatccacggcaaaaggaggaggcatccaagattaaggtgcgtcctttgcttaagaaggagcagctggtgttccagttggagatattccggaacaatcaggtatttcataaaaacgccgatcccggtgaaacctgccagtttctgcttgggtacatggaaaatatgcgccagatgcagatggagacgaagaaatatgcttatacggtgctggtaagcaagaagggcaaggtaacggtgaagaggaaggctgcaaaaggtacgccggccagtgtggatctaagccataaccgaaagaagcagtacattctggaagaggacgtgccggtgccatttcttcaggacttgggagttatgacgccggaaggaaggatcgtccatgcaagattcgacaaattccgccagatcaatcgtttccttgagtttatcgaggatatccttcctgtccttgatgaggaccgggagcttacgatcctggattttggctgcgggaagtcctacctgacgtttgccatgtattattatctgcatgagaggaagggttatgatatacggattatcggcctggacttaaaaaaggatgtcatccgtcactgcaatgaactgggcaggaaatacggctatgacaagctgacatttttagaaggcgatattgccgactatgaaggcgtcaggaaggtggatatggtggttaccttgcatgcctgcgacacggctacggacttcgccctggcaaaagccattggctgggatgcgaaggtgatcctgtctgttccctgctgtcaacatgaactgaaccggcagatggacaatgagacattgaagcctatacttggatatgggctgatcaaaaatcgcatggcagcgctggtgacggatgcgcttcgggcccagtatctggagcgcgaaggatatgatacccagatattggaattcatcgatatggagcatacgcctaagaatatcctgatacgtgcggtcaagaccgggaaaaagggggagaacctggatgcgatccgccggtgcgaggagtatcttcatgtagagccgatgcttgggaggctgctggatcataaaggggaattatagatgagattaaagaatcgattgatagatgcgggaatcctgatagctgtattcattgtggcagtcatagcctttagttattttaccaacaaaggaaataacaatatgactgcggatatgggtgcggccacctatccccaagtatcattttcatataatgggtttaacttaaatacgctgaccggatatgcgaaagagatggacatacccgccatgagggatacggcaactccggttacagaccagaaggtggacgttgggatccaggcgtatgaaaataaggtgtccagcgtgaactatatcgtgtatacgctggatggaaaagaagaactgaaaaaagagaaggttaagaagccaggagaggagttctccatagacttaagcgccgaagggcttatgaaggaagaacgggttcttgaaatcgtgctccatatgccggatgagaagtctgtatatttctacacaaggctcgtggatgccactaacgcgaatatgctggaatgcctgaactacattagtgattttcatgagaatgcgctgggcaaggtggagggcgccggggtcggcgcggcgatcgagccgaatgagcagggagataacacaacgctgcagcatgtgacgatccactcggattatgaccatgtttcctggggcgagttggagccatccgtagagcagggcgagcggtggagcattaaggagatcaacagcaactatgtttccgtacagctggaatacagggtcaggtgcaaaggagaggaaaatgataccgatgtctataatgtgaaggagtttttccgcgtccgccatataccggatgtggcaaagacgtatcttctggattatgacagaacaatggatcagatatttgacccgacgaagcacgttctgaatgagaagggcgtactgcttggaatcgtacctcatgacattccttacatggttaataaggatggctctgccgtatcctttgtagtagcaaatgaactatggaattacaataagggaacagaccagatatccctggtatttagtttttctgatgcggagaatacggatgtacgcaatcttaccgcccagcatgaggtcaagctgctggaagtagacgatacgggaaatacgacgtttgccgtctatggatatatgaaccggggcgagcatgaaggcgaggtaggagtagccatctactactatgatatggaaaagaattccgtggaagaaaaggtattcatttccagcaatcagtcttccggaagcgtgtcaaatgagcttgggaaactagtttattacagcgtgaatcgggatatgctgtatgtcatggtagagggaaccttgtatgaatataatgtaaagaaggaagaagagggaacgctggtaaaagggctggaggacagccagtacgtggtgtcggatgacgggcatctggtggcttatcagtctggcggggccttgaatgaagccagaaagattatcgtcaagaacctgtcaaacggaaaagagcgtacggtggaatgcgccgaggatgagtgcataaggccgcttggatttgtaaagaatgactttgtatatggagttgccaagactgccgatactggaaaaacggtttccggcgagatggcagtgccaatgtataaagtagagatccagaacagtaagagcaaggttgtaaagacctaccagatagacggcacttacgtgctggatgcggtttctgaggacaatatgatcacgcttagccgggctacgaaggaaggcgggacatataccaatatagcgcctgactatattaccaacaatgaagagaaggaaaagagcaatatatatctggaaacctatactacggagttaaaggaatcccaggtgaggctggcgtataatgatggagtgacggataaggagccgaaggtattgaagccaaagcaggtgctgtttgagaatcctacggtgataacatttgacgatgtagatatcggtaataagtattatgtctatggctatggaaaactgaaggggatctatgaccgggcaggcgaggctatcagaaatgccaatggctgcaacggcgtggtggtggcatcggaccagtcctatgtatgggagcgcggcaaccgcaatctccagtatatcatcagcgacaaagatgagatccttcagtccatccgggaccggctgagccagaaagaagcgccggtagatattatgaaggatataaacgacggcaggagcctggatctcaccgggtgcacgacagaggaacttctgtatatcatcagccagggcaggccggtcatagcaatgctggatacggaaaatgcagtgatactgatcggatacaatgaggcagatgtaatctatatagacgttgccagcggcgagagaataagcgttccatatgagcagatggatcagatgacgcagggaagcggcagcacttatgtaggctagtcaggcagactggaagaaagaatggcgcaaaaaagcaggaaaacaatcataagttttcctgctttttgtcgcaaagcctgtattataccgcagtaggccgaaagaagatattcttatacttgcgcaatgcgaagtacagaaccagtccaagcaccccgcaggataaggtctctccgatcccaacagtcagcatcataaaagggataggcagcgccacgctgtagccgtaacgcaatacgaatggaacgacaatcgtattggcggcaattggcggaagcggagccaggaacgggctcttgccacgtaactgataggtgaagattgctccgatcaaggttgcaagacttccaaataggatatccggaagaagcgcgcctcccaagatgttgcccaccagacatcctacaaacagcccgggtatcgcagccggggtgaatagaggcaggatagtaagggcctcggaaatcctgacttggacctctccaaaagaaaacggcgcaaatacataagtaagcaccacatagatggcagcaatcatagctgcctgggtcagaaaagtaacgttcttgttcttcataatattgtctcctttagttttgttttacgtgtggaaggtctcgaacacacgattcattttacggcgggaatcgccggcaagcccttaagaccttagttttattggctttgggacgattgatagtatagcatgcgggaaaagaaaaatcaatggatcaacctaaattctctaaatgagaacaaattatggatttgttaagacggacataagaattagagacgcaaaaagtcatattattatggaagaatggtgctgtactggcagccctgccacttactcgccgcgtatcattttgatatatttactaggtgtcatccctgtggattttttaaatatctggctgaagtactgtggattattctcacatccaaccatatctgcaacacattggatagagtcaatatttccagacgccaatatttcctttgctttctttatccgtgtatctgtcaagtattttgaaaacttacatcctgtttctttcaggaactttttactcaggtaatctacattcataaacaggtaattctctgctatccattttaaagacaattctgcgtcctctatatgcttttctacatactccatgatcttctggctgatatcccccgtatgctttgacgaatggtattcttcataggaagcagccaggtgttccttaagaagcgcgaagatggtgctgcagtcattttcctgatccagctttaccaggaattccgcggctgtcaccatgtcatacgtatggttattagagaccgaaaatatgataacagaagcagccagctgctttaaaaaatcagcatccgatatggactgtaaggtgcaaagcagcgactgaaaagctgggtttgatgaatcatcctgttccgaaaatgcagaagaagtaagcttttgcacttctttgataatgttctggtaattatatattgataaagtagtggtgtcttctgcaaaataaatgatctcgtattttcttaaatgctgtattaattcttttagcagttcttggagattggggtatgattcatgcctgtattcaatagaaaccagttggtttaagctgagtgtatctaaaaaatgataaatactgctcaaatcaagctgcatggctggaaaaaagaaaaccaatgtattgtagacgtaaatcacgctgaatctaataccgggaaagtgcttattgcgaaactggcgcagctgtattagcacatctttataattgtccggaattacataataaacataaaacatctcataacgagtatcttcgaaatcaagatactgcttataattacaggcaatctgggagataccggtgtctgcttcctgtgcttcaagactcaggctgtcattgataattccgaccatcaagttctgattgatattgcggcttatgagagtctggggagtctcgcctctggtggcaagataatttgtataatcttttattacatcctgcaggctctcaataatctgttcttcattgcaaggcttaagcagataatgtttcactccatactgcatggccttttttgcatattcaaattccccataacccgacaatattataaaatgagtgtctttattgatcccgtggatcttctgaatcaggtccagcccggagagtcccggcatcttgatatcagtaagaacaatgtccgggtattcatcgaggatcatattataagcttcaattccatccctggctgtaccaatcagctggattccaagagaattccagtcaatcagtccggccatagtttcacggataatcttttcgtcatcaacaatcagtagttttaacatgttctcctcctggtataataattctggctactgcatgctcggcgtctttattaaatagatgaagtccgtactctgaaccgtacgtgagctggatgcgcttgtggatattgagcaggccgatcccgaatccatggggggttaccagcccctgatcaagctttcttaacaaatcttgttcaaactgggaatcattattgaccacatctatatatacgtaatccccggaacgggtaccttcaatctggatatggcacacttccgtgctttcttccatcgcatagttgattgcattttccacaaggggctgtatggtcaggtggggcagactgatatccatgatagagtcatctatttgctttgtatattcaaggcggtcttcaaaacggatctgctgtatggtcaggtagcttttaacaatttcgagttcacggcggaccgtaaaggtcttatcttttgtatttaaggtttcccgcataagtgtgcccagcgcctctaccatggatgatatatctttttcaccgatagcttttgcgcgccagttgacagcctccagtgtattgtaaagaaaatgagggttgatctggttttctaatgcctttaaacgggcatctttcgaaagaatttcatttacatagttctcctggattagattctgtatctttaaggccatatggtcaaactggttgtgcagtaccccgacctcatctgtgcgcccgctataatcgtatcctgtatccggaggcgtggattcatctcttccgaaggccttcattttttggataagccgactgaaatcgctggttacagaacggatgagcatcctggacagcaagagggaaatgagaacagaaacaaggattaccaccagtgccatgagttttgtaaagtttaatgtagctgatatatgtccgtatgggacaaggcagatataattccaggacgtgttcccaatggagcctttcactgcaaaatatttaccagcatttacagaaatcacaccatagtcggtcttcagcttctttccaattgtgttgatctcgtcggaatccagactttctgagtggtaaaactctgtatctgtgtcaaataatatatattgtgtttcatctgaatgcaggacagagttggtagaagaacgtaccagacggtccatgtctacgcctacgacaaccgtacctaatgtctggaaattcatctggtcaaccctgcggcattcacgtccaagaaagagcccgtaggaattgcagtaatctgtaacccagtatggatatccggagttgttattagcagctttaaccacattttggtggaccgcatccggcacttgagaacttctggcctcatagctttgggttgcaccctgtgcatgatatagattaatgtaactaatattgttatctttatacgtctgataataatctgcaatcaatgtgtttagtgaattctcagcattttttatacggatatcaggatcttcttctgccagagtgatcaggttttttcttatgttagagttggagacgaccgcgcttgtcatagattcgatgtttgacagcttttttgatatatcctgggaactatatgtgagtgaacccgcaagagcctggtacagcagtttattactggaatttaagaccagcagtataccactgaccgaagcggatatcattaagaacacaacaattaaaatgatacatacgatctttgtgctcaactgggaatttgtgattttactgataaaagattttttacttcttagcataaatatacctgtttccttatgtgaataatgttagtattgaggtttttcttattataatgcatatttcaacagggaaaaagggatttagaaaatagaacggaattttgaaaaaggatgtcggaaaagtttatattaattttataatactgtctttataatgtgcttatacaaaagaaactcataaatcacacaatgttaaggaggaaagaaaatgaaaaagattgtttctgtattgttatgtgtaatgatgattgcagtactagcggcaggatgcggcagcagtgatgcaggatcaggaggcaagtctgacagttcgaagacaaaagacactggggatgataagacagcaaatccagaagagtatcaggtagttatgattgtaaaacagagtgattcctggttcgatgatatgactactggagtagagcagcttaagaaggataccggtttaaatgtatctgtacaagtaccggagacaggggatgcagcaagccagatctctattatggaagatctgatagcacagggcgtggacgctatctgtattgtaccaaatgatccggatgcgcttgttcctacgatcgaaaaagcaaaagagtctggtattgttgttgtaacgcatgaggcgcctggtattgcagaaaatgttgacctggatgtagaagcttttgtcaatgaagaatttggtaagttattcggagagaagcttgcaaagtctatggacggaaaaggccagtatgctggttttgtcggcggtcttacgatggagactcatatggcctggtataaagcagcaatcgaatatatcaaagaaaactatccagatatggaatgtgtgacagaagaaccttatgaggatggtaacagcgttgacggcgcacatgataagacattagaaatcctgaaagcatatccagatatcaaagggctctttgactgttctgcacatggcggcggaatctgtgaggcactgcaggaaaagaataagacagatgacgtatcagtcgtatcactggcactgccttctatgtctgccacatacctggaagatggatctatgaaagcaggacttgcatggagaccggcggacgcaggctatgcaacatgctatgctgcatatctgctggcatctggacagaaggtagaaacaggtactgaccttaagattactggttatgaagatatccaggtaaaagacggtgtggcatatggtaatgcgcctctggaattttcagctgataatataaacgattataaattctgataagaaaagggtgccgcaaaataacaagagaatagttattgggcggcacctgaatttattcatggaggtgagatcatgggaacagttttggaggcaaaacacataaataaatcttttattggcgttcaggcgttaaaagatatcagcatcaaaatcaacagtggggaaattcactgccttgcaggggaaaacgggtgcggaaagtcaaccctggtcaagaatatatccggcgtctatacaccggattcaggggaaatcatacttggcgggaatacatatcataatctgaccccaatgcaggctatgaaggaaggtatacaggtaatataccaggacttgtcactgttccagcacctgactgtggcagagaacattgcaatcagcagacttaagtttgatagaaataagatgataagctggaaaaaggtatatgccatagcacaggagcagttagacaaaataggagtaaagatggatcttggccagactgtgggggagatctcaatggcgaaccgtcagctgacggcaatctgccgggcgttagcgcaggatgcgaaaatcctgtttatggatgagccgaccacagcccttacaaagacagaagtagaacgtctgctgaatattatggtggacttaaagaaaaaggggcttgcaattatatttatcagccataagcttgatgaagttttctctgtggcagatacgataaccatattccgcaatggagagaaaatcggtgattttaaaagcgaggatttagataaaaagagcctgtcatattatatgacgggacgggaagtggagtatccaagataccaccgcacgagtaaggaagatactccgatacttgagattgagaacctgaccagaaaaaaccagtacgaaaatatatcactgtccatacgcccaggcgacattgtgggagtgaccgggctgcttggatcaggaaggacggagcttgcattgtctttattcggattaaaccctacgaccagcggccggattaaggtggatggcaaagaggtaaaacttagttcaccaatgaaagcaaagaaatgcgggattgcattgctgcctgaggaccgctttaatcaagggctgtttatgaaacgagagattaaagaaaatatatcctcttccatattagatgatatttctaataaaggagtactgaataaacagtctgaggaacgcacagcagagacatacgtggagcagttaaaggtaaggacgccttctattgatacggtaatagggacgctgtcagggggaaaccagcagaaagtggtcattggcaaatggacggccacatgtccaagggtttttattatggacacgccgacagtaggtattgatattgggtcaaaggctgagatctatgaacagatacataaatttgctgaggaaggaatggctattatctttatctcagacgaagtacaggagattctggcaaactgtaaccgggttatggtgatggctgaggggaaatgtgtaaaaatgctggaagaagacgacttaaaagaggaggcacttgtatgaggacgaaaaaaatagaccggtttcagggaatactgctgttgattattcttctctatagtatatttgtcgcagtgaagaatccggcctttatacatatagagacaatatttgatattatccgtgtggcgtccactactctgatggttgcgatgggactgcttgttgtcatgatctctggcggaattgacgtatcgttcatgtctatcgcgctgtttggaagttacacgacgattcatattatgatatcaatgggaattgacaatctgatatttgcatttggcatttctgctttgattggaggattacttggtattattaacgcgctgttaatcaactggctgaaactgccgccgttcattataaccttgggaacgcagaatcttttccatggaattatgactacttttattggcgacaaatcatttggcgcaggcgtactgccaaagagtattcattccttcggccaggcagctgtgataaagatcgggggcgtgggcttaacatcatctatcattcctgtattacttgctggcgccctaacctggttcattctttaccgtaccatgaccgggagaggaatcttcgcagtcggaaatgatgaggaagcagccagaagggctggctttaatccattcaagatccgcttgattgtatatgtgtactctggaatcctggctgggattatggggatgatgtacgtagcgcagacaaatgcactctatccaaataaactggtgggggatgagctgatggttgtggcagctgttgtaataggcggtacgaagataacaggcggacagggaaagattttaggtgcgtttcttggtgtcattattatctatctactgaacaccacgttgattatgatcggcctgtcatcctcctggaacaatctttttgtagggacaattcttgtaatctccgtggcagtgacttcctaccaggagagggttaagaaccgcaacaatctaatttttacggaatagggggatgaaagatgattaagataaaaaaatgggctggcagagatatgaatctcactatattgatgggagttacgcttgttatactaatctggagcgggatggcgtttgggcagtccatgtattctatgcggaatatacagtccatgacattccagataccggagtttggctttctggcgctggcaatgatgctgtcaaatatgatcggcggaattgacctttccattattgctaatgcaaatactgtggctattatgacagcgtatgtgctgaatggccaatggtcctttgggacagagggagcggcaagagttgtgctggcacttattttcgccgttttgtgcagcttgttgtttggattgtttaatggacttttaatatcaaaaacatctgcaccgtcattgattgcaacgttgggaacgatgacactgttccagggaattggaatggcagtgacagggggagccagcgttggaggaattgaagaaaaattcgcgcagattgggaagagcactattctgaatcttccggttatcttctggctgtttatccttgcgtctgtaatacttggccttgtaatgtcatacagcggttttggcagaaaactgtatttgtacggagataatccggttgcagccagattctcggcaatccataatgaaggaatctgcatcggcacatttctgttgacgggtctgcttgcagggcttgcgggactgattattctaagccgtgtaaattctgccaaggtggggtatggagattcttatctgcttcagacgctgattgtctgcgtaataggcgggatcgacccgaacggaggaagaggtaaagtgtggggcgtattgattgcagttataatgatgcagattctgtccagtgcatttacgataatgtccttgtctccatatacgaaaaaattgatatggggaattatgcttgttctcgttcttggattaaactttattattaaaaagtattctggcatgagaatgctgaaagccagcttgaatgcgaatatagagaaataagcaggaggtcaaagaatgaattgcagaaaatatgaagaattatattgtaccgtacttaacgaacacagagaagtctttgaaaagcaggacctggatgaggttactttatttatggaacaaatcaggaaggcagagcggatctttgttatgggcgtaggcagagaagggatcgcaggccggtcatttgccatgcggctgatgcaccttggaaaagaagtacactggatctgggacgacacaacacctggcatgcatgagggggatttatttattgctataaacgggtcgggtaaaatcggccacattcattatgtggtcaaacaggcaaaagagaccggggcagcaatcactgtggtgacaggagggccaaaagaaaagacagcccgcctggcggactgtgtgttatttgttccggcaagtgtatttaacgggacagactctagagcggtaccgtccgtacagccgatgggaaatctgtttgaacaacacctgtttttgctgtttgatattattattatgctgctggaagaagagatgaaggtgacgcacgaacagatggaggccaggcacagaaatatagaataaagaaaataaaatctatgttgatttaatatgcttatcctgtaccagcagggtcaaggagtgtttctaaatatctagttctccaaaattaatggttaaatcttcatagatatcgacgttaacggtatcggaaaagtgtattcctctgtatcttctgatacaaagttccataccaagaatggtttgattgagagaaacccggttatgttttacctaatactaaggctgaggaaatggagaaaattgcatcagtattttaagaacgggagattacagcccgttctttttgtgtccgaaaaatgtccgagattgcaatagtatagcatagcgggcgaagtaaaatcaaggaatgtacacaaaatatatacgctacgccagggaacatgtagggagatgtcttgtgcctttcaaaacggagagtgatatgatataataactgcaaagtgtcaaaaaacgctagtaatattatataggggacaggagggcaggtatgaatatattagtagtagacgacgagaaggaaattgcagatgtgattgaactctatctccagaatgaccagtatagcgtatataagttctataccggccaggaggcgctagactgtattggcggcatgaagatcgatctggcgatccttgatatcatgcttccggatattgacgggttccagattctgaagcagatccgggaaaaatacacgttcccggtaatcatgctgacagccaagacagaatatatggacaagatcacggggcttacgctgggagcggacgactacatccccaagcctttcaatccgctggaactggtagccagggtaaaggctcagctgcgcaggtatacccagtacaatgaaggggccaaagaagaaggtgagattatagatttcgggggcctggtactgaacaggacctctcatgaatgcatctataatgaaatgccgcttacgcttacgccgatcgaattcgatattctctggcttctctgcgagaaccgggggaaggtgatcagttcggaggaactttttgaaaaagtatggcatgaaaaatattacaagaacagtaacaatacggtgatggtgcacatccggcaccttcgggagaagatgaatgcgcccaccggcaaatctgattttatcaagacagtatggggagtaggttataaggttgaagaataactatcgcaaacttaagttcagcatcctgctgcagacggtttttgtaaccgctgtcacggtgctggtgggcggtttcctgctgaattatgtaattgatggcatctataatgacagttttgccaggatattcgtagatttcctgacttctcttgatgtggaggagaagacggccatagatttatactggaaactgatcggagacaacaaggcatttttcatggttgttggcttcctgcttctttttgccctgtttttctatgtagccctgtctaagatgacgaaatacctggatcagataggagacgggatagaaaatatcgtgtcggattccacggagccgattcatctgatcacggagttaaagccgatcgagatcaggctgaatgagattaaggcgaccctgaagcgccaggaactggaggcggaagagggggagaaaaagaagaacgacctggtgatcttcctggcccacgaccttaagactccgctgacctctattgtggcatacttaagcatgctggacagccatccggacatgtcgcaggaagagcgggagaaatacactcgcattgcatttgagaaatcgctgcgtttgggagaactgatcaatgagttcttcgacattacccgctataatctccagaatattgaactggagtccgtggagatcaacctgtcattgatgctggagcagctggcggatgaactctatggcgtgctgcaggaaaagcagcttgcctgtcaggtagaggtggaagagaatctggtggtctacggggatccggataagctggcccgggtctttgacaatattctgaggaacgcgatcgcatactgctatgataataccaggattcagatcgaggcacagatgaaggggcaggatgtggagattatctttacaaaccagggagataagattcccggggcaatgcttcagaccatatttgagaagttctaccgcgtagatggctcccgctccagcgggaccggaggagcagggcttggactggccattgccaagcagattgtggaattgcatggagggctgatccgtgcaaaaagcgatgacagcaagacgcagtttattgtgacattgccgacaaggatagaaaaggaagaagggacagcagaggatgaagttcatacacatcgcagacgtacatttaggagcaagcccggacgcaggaagcacgtacagcgagaagagggcgaaggagatctggaatagcctgaagagagtggtagaggcctgtaataaagagcgggcggaccttcttctcatagctggcgatctgtttcaccgtcagcccttgcttcgggaactgaaggaagtcaattctcttttagcgacccttaagcatacccaggtagtgctggtggctggaaaccatgactatctgaagaaagactcttattaccgcactttccgatgggcgaggaatgtgcagatgattctgtcagaggatatctcctgcgtggaattccctcaactatccctggctgtatacggatgcagctaccattcccgcgagattaaggaggcaaagtatgataatgcatttgccaggaagaagcagaggtatgagattctgattgcccatggaggggacgagaagcatataccgatacaaagaaataaaataaaggcccttggctatgattatgttgccttgggacatatccataagccgcagatgtttcaggaagaaggcgccgcctatgcaggcgccctggaacctattgataagaatgatgtcggccctcatggctatgtccggggcgagatggatgataaaggctgcagggtatggtttgtgccggatgctgaaagagaatatgttcacatggatgtagagatagacaaggccatgacgggccactcggcgcgggaacgaataaaggcgcagatcgaagagaggggagtacagaatctatataagattacgctgaaggggctccgtgatccggatattctatttgatctgggggacatggatccatatggcaatgtggtagaagtgtcggatgagacaaagcctgcatatgagtttgggaggcttctggaacagaacaaggataaccttctggggaaatttattgaatcactgctaaactatgagaaggacagcatggaatatcaggctctgtgcgaaggtgtccaggcgctgatggaaacgagaagaggctagatatgagaattcgggagttaataatcaggaacttcggcaaattttcggataaggatattttgctggaagatgggatcaatatattatatggggagaatgagtcagggaaatccacgctgcatgcttttatcagaggaatgctgtttggcatggaaagaggccggggaagggcttcccttaatgatacatacagcacctatgaaccatgggagaaccccaattattattcaggagttctgagattcgaaagcggaggaaagatgttccggattgaccggaattttgataaatattcgaagaaggcagaactctactgcgaggatgacggagaacaactctctataaaagacggggatcttcagatgctgctgggagagcttagctctgccagttatgacaacacgatatccgtgggccagatgaaggtggagacaggccagtctcttgcggcggaatttaaaaattacgccaccaattattacgctacaggcaatacagagattgacctggaaggaacccttcagaatctgaaagagaagaagaaggcgctggataaggaagcaaaagaagccttggtcaggaagcagcagaaaagagaactcattgagcaggaggcatcctatgtctggcgggatatccaccggctggaagaagagcaggatagtataagggaagaactgctgcacagggaagagaaggagaagcaggaggagtcttccggcaaaggagtcatagacgagctgcgcccatccaagtggcggattcatccggtagagatcgggctttttatcattttcattatcctggcggtgatcctgatcgccaggccgtggaactacctggttgcgatcgtcatcttcctggcatgtggattatacgtgtggaatcgcatgaaagaggggaaaaagaaggaaaagactccgccggagatcatactggaggcgattacgccggaagaagagaagattcccattgaaaggcttgtatgggaaaagaaacgcgtggaagaagaactgcaggagaagcagatacaatatggaaacttgaaagaccagctgatggaccttgatgaagtcagcgaggattcccagtggattgaccgcaggcgtgctgccatccagatggcaacagaccggttaaacgaactttccggagggcttcaggtgcagttaaaagaggaattaaacaggaagatctctgagattatatgccggattacaggcgggaagtatacaaggctcctggtggaggaagacctgcacatgagcctgttatcggaagggaagaggattcccatggaacaggcaagccgcggaacaatagaacagatttatttttccctgcggatgactgccagcaaagttctgcaggaagaggagaatccggttatactggatgatacctttgtctattacgatgacgagcggctgaagcatacgcttgcgtggcttgcggagaataaaaagcaggtccttattttcacctgccaaaagcgggagatccaactgttggaagaactgggattggattatcacaaggtctgcctgtaaaagtcctatgaagataaacgcacataaaggaaccgccaaagtagattggatagattgccatctctactttggcggtttcttttgcgtaactagatttcttcgcctcttttatatttctccagaacattctggatacgctcgttgggattcagaatgctgctgatggaaccgtcatggttcagggtatcaatcatcagcgcgatgtatttgctcatctcgcagctgatatagtatggacgttccagaagttccggcgtctgatagatcaggttagtggtcagaatggcatcgatcaggccatcttcgtaggctttgtcaaacttctcgaggccattggtgaacaagccgaaggtagctgcagcaaaaatccgccttgccttgcgctgctttaattgtcgcgctacatccaggatactgtcaccggaagagatcatgtcatccaggataatgacatcctttccctccacagaagagcccaggaattcatgggcaacaatcggattgcgtccattgacgatcttcgtatagtcgcgccgtttgtagaacatacccatatccagattcagcatgttggccagatagatcgcgcgctcggtggccccctcgtccgggctgatcgccatcatgtggtcgcagtcgatctgcagatccttgaagttgcgaagaagccctttgataaactggtatgtggggcgaaccgtctcgaagccattcagagggatggcattctgcacccttggatcatgggcgtcaaaagtaatgatattgtctacgcccattcgcaccagttcctgaagtgccagggcgcagtccagggattcccggctgcttctcttgtgctggcggctttcatacaagaacggcatgatcacgttgaggcggcgggcctttccgccgatagctgcgatgacacgcttcagattctgataatgatcgtccggggacatgtgattctcatgtcctgtcagcgagtaagtcaggctgtaattgcagacgtctaccatcagatagatatccattcccctgacagagtcattgataatgcctttggcttcaccggagccaaaacgggggacttttgcatctattagaaatgtatcccgttcataaccgtggaaaacgatgtcatccttgtgagcatgtccatcctctttcctccatttgacgaggtaattatttaccttgtctcccatttctttacatccgtcaagggcaatgattccaagcgctcctacaggaatgttgtcaagattacgatcgttacggcgtaacatcttttgtacctcccaggtttaataattttttttggatacggatatcatctccggtaaggcgcagaatcgtatagttactgctgatccgggagaaagtccgctccgaatagatagattttatgtcttccaatgcaagattggtagatataatggttgatttctgccttaaaatacgctcattgaggcagataaacaactgcgataccgtaaaagaatttggaagttccgtgcccaggtcatctatgatcagaaggtcgcagtcatagatgtgctcgcaggcgtcggagtcctttgtatcttttctgccaaatgcgctctcggcaaatatatcaaagagctgtgtcgcagtaaaatatataacagaaaatgatgcatcgatcaactctttggcaatacaatgagagaggaaagtctttcctacccccgtatctccatataatagtatgttttgaaactctgtggaaaatgtatctatgaattcatgacaggctttcagcgcggtctgtatggcttccagcgaggatcttccggtcagaggatcaatatggttgctggaataaaaccccagagaacaggtagaaaagttctctttgcctaatatttcctgtagatttgactgcgtgtacaaaagatccacgatggctttctcaaaacagtggcattttttcgtgccgatatatccggtatccttacagtccgggcaggtataatgaagttccaggtaatcctttggcagtccatgagattcaagcagctgggatttgcgttgggacaggctgcggacatcttccttcagagaagaaagtgccccctgattgccgtccagaaggctgcgggccttttctacgcttaaggaggagatagaatgatccaattcttccagggccggaatcagggaatatgctttttcatagcgtctccttaactggtattcattatccagttgtctttgttcgtaagtacgcatcaactgatcgtactgggaattggaaagtgccatattatggtagatctccttatattattgtgcttactgctgaaccagcttgcgctccaggtcgtccatatcataggaacggccgtcgaaattgttgaatttattattctttgtattgatggcaggcttggcagcctgttttttcttgcgttctttttctctcaggtaatcagcgtccagggcttcgatatccttcagataatggacattcttgccaagccagtttttgaggatggtatccgtatactcaaaatttggctgatggatggtgttcatagtacggttgcatgcttccaatatgatgtccagcgagaagccatactcctcattccatttgcggatataagcaatctcggaagtggcgggagctcgtcccttgattccgtaagcgtttaatatggaatagcagttcttgttatataagatcgtgctggacttggctgcctccacggtagtaatcttctggtcatcccaggagagggctaccttctggatgtaatgcatgcttttatgcccgttctcgacacagtattcgatgagatactcgatcaattccgccgacatgtgcagcgtatcgtaaaaatatgtaatggtgtcaatatccatggaagacagcgtctttccaaggtattgctctgctacaaaaagcagttccttgaattccttgcgttccttcctgctgcggtactgctgaatgttaggcacggacgcggagtcatcctgtacatcctgcagaggcgaggagtcagccgttatctcgtcggaggcggcgttcttcctataagaagcaggggcggattcggaggcggggagttcttcgaaatcctcgcagtagtccagcagtctctgctttttccagtaattcagcgcgcgaaccacatccttttccgtgcattccagcttatctgcaatctctgaaacggacagcatcccggaaggctcattcatgtggcgcagcagaagaagatatacctttacatattctccgtttgccttgaccatatgatggtcaataaattcattctcaagcacagtggtattgccctgcgcatagttggtaagtgttagtttcttcataattcttacgccagtcctccttgtcagttcgtttctcgtgtatgagttattatagcaccagaaggacaggcgcaaaagaaatttctaagccaaaatccatgttttttgtggataaaaatctgtggaaaatgtggataactaccgctttaaaagttcttcgccaatgtttacaacatctccggcgcccatagttatcaacaagtctcctttttgacacttttctacacaaaaatcctggatgtcttcgaaagaagagaagtaataggcatcgcatcccttttccttcagcgcatccgcgatatccttggaagagattcccagggtatcggtctccctcgccgcataaatgtctgaaagcaccacgtggtcggcatgggccagggcctccacgaattcatggaacaaagccttggtcctggtgtaggtgtggggctggaaaacgcaccagagttcccggtggggatagtacttggctgcagtcagagtggcgtttatttccgttggatgatgggcatagtcgtcgatgatggtaacgccatccatctcgcccttgtattcaaatctccggttagttccagtaaattccttaagcccctttttcatcttatcaagggatactccaagaaggtcggagacggcgatggcagccaatgcgttggatacattgtggtcgccattgacggacagagatatccgatcaacgaagacgccagcttttaccaggtcaaaagaagcctcccctagtttattatgggagatgtttgttgcgctgtaatccatggaactgtcatctccgtattttatgatacggcagtcaagtcctttggtaatacagtccagtttgtcgatatttccattgatgatcaaagttccgtcctttggaagaagcttcgcaaacttgtggaaagaactgcggatatcgtccagatccttgaagaaatccagatgatcctcgtcaatattgagaataacgcttatctttggaaagaaatgaaggaaactgttggtgtattcgcaggcttccgtaacgaacagctccgatttccccacctttatattccctccgatcgccttgaggatgcctcctacggaaatcgttggatccatttcgccggccagcaggatatgcgagagcatggatgtagtggtagtcttgccgtgagtgcctgagatggcgatgggaacatcgtaatttgtcatcagctgtcccagaagttccgcccggctaagcataggcagcccctttttaagagcctgggcgtattcctcgttgtcttcatggatggcagcggtatacacgaccacatcaattccttcaataatattggacgctttctggccatagaagatggtggcgccctgctgcttaagatgactggtcagggctgattccttgttgtcagagccggatatggcaaagccctctttcagcagaatctctgccaggccgctcatgcttatgccgccgattccgataaagtgcacgtgtacaggttgctcaaaattgattttatacataaaataccttcctcttccatatgttctgtttccgttaaaaatgtagtcataaatatatatatctttccatattattatatacatatatggaaaaaaaaccaagccgtaactttttgtgatattttaataaaaagttcacgaaaagttcattttatttgtaaaatttgttcactcaaaatcaaaactatggtataatgtgaactataagaattactgagaaggggtgatgacatgatcaagaaagagatgattgcaatgttgctggcaggaggccagggaagcagattgggagtcctaacagccaaggtagctaagccagccgttgcttttggaggtaaatatagaattattgacttcccactcagcaactgcattaactcaggaattgatactgtgggagtgctaacgcaatatcagccattacgattaaatacgcatataggaattggcattccatgggatctggatcgtaatatcggaggcgtaacaattctgccgccttatgagaagagtaacagcagcgaatggtatactggtactgccaatgccatataccagaacttggattatatggagacatttaatccggattatgtattaattctttccggagaccatatctataagatggattatgaagtcatgctcgactatcataaagagaacaatgcagatgtaacaattgcagcaatgccggtgccgatcgaagaagccggcagattcggcatcgtaattacagatgaagacggacggattaccgaattccaggagaagcctccgcagccaaagagcaatctggcttctatgggcatctatattttcagctgggcggcactgaaggaagcgcttgtggcattgaaggacgagccggggtgcgactttggaaagcatatcattccatactgccatgagaagaatgagagattatttgcttatgagtataatggatattggaaagatgtagggacgcttggctcttattgggaagccaatatggaactgattgatattattccggagttcaacctgtatgaagagttctggaagatatataccaacagcgatattatccctccgcagtatatttcaggacaatctgtgattgaaagaagcattatcggcgacggatcggaggtgtatggggaagtacataactgcgtaattggttccggtgtcacgattggggaaggcacggtagtcagggactctattattatgaaagacgtaagcattggcaagggctgcgtaatcgacaagtcgatcattgcggaaaactgcgagattggggacaatgtaacatttggaattggcagcgatgtgccgaacaagcttaagccggcagtctattccttcggccttgtaacggtcggcgagaactccgtcataccgggccaggtgcagattggcaagaacactgccatcagtggcgttacatccaaagaagactatccgaatggagtactggaaagcggagagacattgataaaggcaggtgagcgagcatgagagcagtaggtattattttagcaggtggaaacagtaataagatgcgtgaattgacacataagagagcagtggcggcaatgccgatagccggaagttacagggcgattgattttgcgctcagcaacatgtctaattcacatatacagaaggtggcagtgctgacccaatacaatgcccgttcattgaatgaacatctgaattcctccaaatggtgggattttggaagaaagcaaggcggcttgtatgtgttcactcctacgatcacggcagataacggatactggtacagaggaacggcagatgcgatctaccagaatctggaattccttaagagatgccatgagccatatgtgatcattacatccggcgatgcggtatataagatggattataataaggtgcttgagtaccatattgccaagaaggccgatattacggtggtttgcaaggaactggagcctggcggggatgccagtcgcttcggaacgcttaagatgaacgaatctatgcgtgttgaagagtttgaagaaaagccgatggttgccaattcaaacacgatttctacgggaatctatgtaatcagaagaagacagctgattgatctgattgaatcctgcgcagaggaagacaggcacgattttgtaaccgatatcctgatcagatataagaatctgaaaaagatatatggttataagataaaagattactggagcaacatatcaacggtggacgcttattatcggaccaacatggatttcttgaagccggaagtaagaaattacttcttcaagcagcatccggatgtctactctaaggtaagtgacctgccgccggcaaaatacaatcccggcgcagtggttaagaacagcctggtagcgagtggaagcattatcaatggtacggtagagaattctatcctctttaagaagacgtttgtcggtaataactgtgttattaagaattcaatcattctgaacgacgtctatctcggggacaatacatacatcgagaattgtattgtagaaagtcgtgacacgattagagccaatacacgtcatgttggggaaaatggtgtgaaagtagttgtggaaaagaacgagaggtatgcactatagtgcagcggcttgtaaagaaaggggctagaggaaaatgcaaatcacggatgtacgcgtgcgtaaagtggcaaaagagggaaagttaaaggcggtagtatcaattactatggatgaggaattcgtagtacatgacatcaaggtcattgagggtgaaaaaggactctttattgctatgccgagtaaaaaagcattagacggggaatatcgagatattgcgcatccaattaattcagtgaccagagagcgtatacagagtattattcttgagagatacgaagaagcgttgaatgaagaggaagaataagaaatattaagatggacagggtatgcataaagaatgcatgccctgtttgatttgcggcgaccgaaaaagtatctagcctaacaaatgaaacgtcatgtttttatgtgttttgggatgtaagaattccagccggtaggcgcacaggcagatgttctgccagccttcgtccttatgcacatttgggttatacttggtatcgcctgcgatggggcagcccatgtgggacagctgcacgcgaatctgatgatggcggcctgtatccagcctgatatccagttctgtccgtggcgcatcatcgtctttggattggtcaaagaggaaaggcccctgttctacaacggtataatgaagacgggcaagcttggctcctgccgtgccggaaacgcagacacgggaagtgttggtgcgcccatcctttatgagatagtcctccagcgtgccttctttctgagagggatggccatccgccaaagcacggtaatattttccaaagccatggctttgcagctggcggtttagttcctttgctgcaaagggcgtcttggcaaaaaccaggattccttttacgggctgatccaggcggtggatgaccgccaggtatggctcgcctttttccggggcagactgacagatatgattcttaataagactttccatatcgggcgtgcctgcccgcctgctctgggttgggaccccgtgaggttttatgcacaccagtatgtgggcatcctcatataagatttctatgcgcttggtattcatatgaattctccttgactttgcgacttttcactcttatcatttaaacatagtggattaaaatatgcaaataaaaataggggaaggcagaaaaatggattatttactattgattctgggatttatattattgatcaaaggagcggattattttgtggacggcagttccagcgtggcaaagctcttgaaggtgccatcgattattatagggcttacggtagtggcatttgggacaagcatgccggaactgtcggtcagcgtgacagcggccatcaagggaaataatgatctggcggtcagcaacgtgctgggatcgaatatattcaacctgctggtggtgcttgggtgctgcgcgctggtgaatcctgtccgggccaagtggtctttgctgaaaaaggaattcccgttttctatctttatagcggtgattctgctgcttctgaattccgatttctcgattacaaaggtactgagcggggaaggaaaatatgttcttggcagatggggcggactgctttttcttgtattgtttgccgtgttcctgtatgcgacggtcaaaacggcgctgcgttccaggcacgaggtgatggaagaagaggaagattataaactgcttagtccggcaaaaagcgcgggatacatcctggtgggcctggctggcattatctggggaggcgatctggttgtggacagcgcaagcagcattgcggtatcctttgggctgagccagacattcatcggactgacgatcgtggcccttggaacatccctgccggaactggtgacatccgtagttgcagccggaaaaggcgagaatgaccttgcggtgggcaatgtggtaggctccaatattttcaatattctgctgatactgggagtatcggctgcgataacgccgattgtgctggatattacagcggtctacgacacgatgattctgatcatggcaagcattatcgtatatgtggcggccatcagcaagcgtgaaatacacagaaaagaaggcgtgctgtttctggtcgcgtatctggcattttttatctatgtgctgcttcgatagggcaggcttttggcggatttcgtaatattttgggttgacaaatgagtggcaatagattaaaattacgtttaattcaatatcatttggcaatgaagaggattagtacatgtaagcgagcctcagagaggggatcatctggtgcaagatttccgcttagaactgcatggaacccgccttggagccactgcatgaaagtgcagcgtcctgccagcgttaatggttaatgagagaactgcgaaagggtcgcagttaactagggtggtaccgccgagcttttcggtccctttttagggagcgaaaagcccggcgttttttgtctgcggcaatcaagttcccgccagtaattaaagtggggcaagggccctgcgagagaagaaaaggagaagagaaacatggcaaaggaaaagaaattagttgaaagcatcacgccacgtgatgaggatttcgcgcaatggtacacagatgtcgtacgcgaggccgaactgtgcgattattcaagcgtaaagggatgcctgaactacctgcctaatggctacgcaatctgggaactgatccaggcggatcttgacaagcgttttaaagagaccggggtagagaacgtatacctcccaactttgattccagagagccttttggaaaaagaagcggatcatatcgaaggattcgctccggaagtagcatgggtaacacatggcggtatggaaaggttacaggaaagattatgcatccgtcctacatcagagacgctgttctgtgatttatgggcaaagacggttcagtcatatagagatcttccaaaggtatggaatcagtggaataccgtactgcgctgggagaagacaacaagacctttcctccgttcaagagaattcttatggcaggaaggccatacaatccatgcaacatatgaagaggcggaggaacgcacgatccagatgcttcatgtatatgaggactgctacaaggagacgcttgcgataccattcgtatccggaagaaaggcagagcatgagaagtttgccggagcacaggatacgtacaccattgaagcgctgatgcatgacggaaaagcgttgcagtccgcaaccagccatttcttcggaagcggattcccggatgcgttcggaatcaagtatgtggataagaacaaccagcttcagagcgtatatgagacatcctggggatggtctacaagaagtatcggcgcccttatcatggttcatggcgatgacagcggactggtgcttccgcctcatgtggctcctgtagaatgccggatcatcccgatcgcacagcacaaagaaggcgtgctggacagatctttcgcactgctggatgaacttaagaaggccggatacagagtgaagatcgatgactctgataagagtacaggatggaaattctctgagcaggagatgcttggaattcctactcgtatcgagatcggacctaaggacattgagaagaatcaggtggtcgttgtccgccgtgataaccgtgaaaagatcgtcgcatccctggatgagattgcagtgaaactgcgcgacatcttagagcaggagcagcaggatatgtatgacagggcgaatgagttccttcagagccacattgatactgctacaaccatggatgaaatggttgagaagttcaaggctaaccgtggttttgtcaaggcctgttggtgtggagatccggaatgcgaaggcgaagtgaagtacgccacaggcggagcggcaaccagatgtctgatagaagatgaggaaatgatttccgataaatgtatctggtgtggaaagccagccaagcatatggcatactggggcaaatcctactaggaaatagagtgcttagaatatcgggaactgctgtaccaagattgaaaaatccttggtatggcagttctttttttctttgaacagtcttggaatgtcatagatttgttaattcaggaggaaatgtgatatgataggataagttagtttatttggaggatatcgctgtggaagatagaactatacaattgcctgaaaaagtaggcagaattatcggaacgcttcaggaacatgggtatgaggcgtatgcagtaggcggatgcatccgggattctatcctgggaagggagccggaggattgggatatcacgacatcagccatgccggaagaaacaaaggctttgttcgataagacgtttgataccggcatccagcatggaacgattacggtactcctggaaaaagaaggatttgaagtgacgacatatcggatcgacgggaaatatgaggacagcaggcatccaaaggaagttacctttacgcgcaatctccgggaagatctgcttcggagggattttaccatcaacgcgatggcatataatgaaacggatggcctggttgatatatttggagggcttgaagatctggaagcagggatgatacgctgcgttggcaccgcgaaggaacgattcaaagaagacgcgcttagaatcctgcggggagtgcgcttcgcggcccagctgggattcgatatagaggaggacactcggcaggggatgaaagaactggcctggacgcttcagaatatcagtgcggagagaatacaggtggaattagtaaaaatgattacatcaaagcgtccggaaatgctgcgtgaggcatatgaattaggaatgacgcggatagttcttccggaattcgaccagctgatgacgactggccaggagacgccgcaccatatgtatagtgtgggcgagcatacgctgcatgccatgaagaatatccgcgcagataagatcctaaggcttgccatgctgttgcatgatatgggtaagccggcgttgaagacggtggatgaagcaggagtcgcccattttaagaagcatgccctggagagcgagagaattgccgagaatgtgctaagaaggctgaaattcgacaatgatacgatacgcaaagtgacaaggctggtccgctgccatgatcttcgcatgcctgccacggcaaaaagcgtgcgcagggccatgaaccagatcggggaagaactattcccatattacatggaagtacgccgcgcggacgtgctggcccagagtatgtatcagagggaggaaaagatcgagaatctggatcagatagaagaattataccaccagatcgtggaagatggcgactgcgtatctttaaaggatctggcggtgaccggccgggatctgatcgcctcaggcatgaagccgggcaagaaaatcggcgagaaactggaggaattgctgaaactggtcatagaggatccgaaattaaatacaaaggaagaactgctgaaacggctgaattaaagaaaatcccctgcccttaatcatattttctcttttcctgacatacgttagagagaatatgtaaaatagagtgcaggggattagtatgcaggaatatgaactaggtgttttagagcagtataatatagaagtcatcagcacccgtaaaaccaggggtgctattttatgcgacacggatcaggggctgcttttgctgaaagaagtgagggtgtctgagaaacgtatccctgcgctgttcgaattgtatgaatatctttatagccagggatatggaagaatagacaggatcatattgaccagggaaggagaatgcctttctgcgctggaagacggcagcagatatatgctgaagtcctggttcaagggccgggagtgcgatgtaaagaaaccggcagaactgcttgcggcgtccggcaacctggcgaaacttcatatattgatgtgccatgagctggggagcaatgtgacggcgggcgcccatctgaaagatgagtatctgcgccataacagggaattaaaaaaggtgcgtaagttcatgaggggtattgcgcccaaaggagaatttgaattcgcgtttctgaaacattttgaccagatctaccagtgggcggacgcggcgatagcggaactggagaattcggactatgagagcctctaccaggacagcgtgaagaactgctgtatgacccacggcgagtataactaccataatatactgatggtgcagggggattataattacaagaaagagccttaccgcattgccaccactaactttgagaagtttaagagggatgtgcaggtggaggacctgtattatttcctgcgcaaggtaatggaaaaacatggatggaaggaacggcttggggataatatgatcaatgcatattccgcgatcaggccgattacggatgcagagctggaatatcttaaggtacgcctgatctatccggagaagttctggaagattgccaattcgtattatcattcaaataaggcgtggatatccataaaaagtatagagaaactcaatacttccattaagcagacagaagaaaagaggcggtttttagaggacatattttcttttcatttatagtttcctgttgtataataaaatcattaaggacaggaggtacgactatggaatatcgtgaaaaatttgagggatggctaagcaatccatactttgatgaaaacacaaaggatgaactaagaagcatagcggaagatgataatgagatcaaggagcgtttctacaaagatctagaatttggaactgccggactaagaggaatcatcggcgcaggaacgaaccgcatgaacatctatacagtcagaaaggcaacccaggggcttgccaactatatcatgaagaatggcggtcaggcgaaaggcgtggcaatcgcgtatgattcccggcgcatgtccccggagtttgcagatgaggctgcattgtgccttgctgccaacgggatcaaggcgtatgtatttgaatctctgcgcccgacgcctgaactgtcttacgccgttcgcacgcttggatgcatagccggaattaacattacggccagccataatccgccggagtataatggatacaaggtatactgggaggatggcgcacagattacccctcctcatgacaaaggaattatggatgaggttgaggcagttacggattataatacggtaaagaccatggggcttgaggaagcaaagaaggccggactctatgaagttatcgggcaggaagtggacgatggctacattgcaaaacttaagaaacaggtgatacatcaagactccattgatgcggtaggaaaggaactgaagatcgtctacagtcctcttcacggtaccggaaatattccggcaaggcgcattcttaaggaattggggtttgaaaatgtatatgtagtaaaggaacaggaactgccggacggagaattccccaccgtttcctatccgaatccagaggccaaggaagcctttgaacttgggcttgcgcttgcaaaagaggtggatgccgacttggtgctggctacggatccggatgccgaccgacttggagtgtatgtaaaagatgccaagtcaggagagtacaaggtacttaccggcaatatgtccggttgcctgcttgcagactatgagatcggccagcgcaaggaagtcagcggccttccggacgacggctatctcattaagaccattgtaacctccaatctggcggatgccatagccaagggctatgatatcggactcatcgaggtcctgaccggctttaagtatatcggacagcagatcctcggattcgagactacggggaaagggacatatctctttggctttgaagaaagttatggctgcctgatcggaacctacgcaagggacaaggatgcgatcgtagcgacaatggctctgtgcgaggctgcagcctattataagacgaagggtaagaccctgtgggacgctatggtggacatgtatgacaagtatggctactataaggatgatatccagtctatcacgctaaaaggaatcgaaggccttcagaagatccaggaaatcttagagactctgcgcaagaacccgccgctggaagtaggcggatacaaggtgctgaaggtaagagactatcaggctgatacgatcaaagacgtggctacaggcgatgtggcacagaccgggcttccaacatccaacgtcttgtattatgatctgacggatgacgcgtggctgtgcgtaagaccatccggtacggagcctaaagtaaaattttattatggaatcaagggaagttcccttaaggatgcggatgaaaaatcaagcaagcttggagaagaagttttatccatgatcaacaccatgatgtaagtcagggaaaaagtgggaaaaccctgaaaatacgggaaaaactgagaaatcaccttgacaaatacagggaaaacaggtataacagtaactaaaggcatgccatatgagcgtatggggagccgaataatttgtagaattgaaaataagggattctatacgtaaacaagaggaggaaattatccatgaacaaaacagaattagtagcagcaattgctgaccaggcagaattatctaaaaaagattctgaaaaagctttaaaggcttttattgatgttgtaacagatgaactgaaaaaagatcataaggtacagttagtcggctttggcactttcgaagtaagcaagagagcagcaagagaaggaagaaatcctcagacaggaaaaaccatgaagattgaagcatgcaaggctccaaaattcaaggctggaaaagcattgaaagacgctgttaacgcataattcggcgaacggataagttttataaaagtataggaatagagagcgccttacgctctctatttttatgtctggaaggaggatgttatgagactggacaagtttttaaaggtttcccgcctgatcaagaggaggaccgtggcaaacgaggcctgcgatgcaggaagagtgaccgtcaatggaagcgtggcaaaggcttccgtgaaggtaaagccaggagacattattgagattcgattcggaatgaagacggtgaaggtggaagtgctggatatacaagagaccacaaaaaaggaagaagccaaagatctattcaaatatctgtaataaatggaaacaacccttcataagataattaagaaaggttgtgatgcgcatggaagaaagaaccgtacaaaaaaaccataaactggtgatcaataaccggaaaaccagccttgttacaggcgttatagatgtgctgtcctttgacctgaatgagattctgctggagacggagcaggggatgatgatggtgaaggggacagatctgcatgtcaaccgcctgagtctggaaaaaggggaagtagacctgtcaggaaatattgacagcgtggcttattcggatgtccaggcgcatggcaagcagcaggagaacatattctcgaaattattcaggtgattgtatgccgggactgaaagaagaattaatggtgtttgtgatggcggtaatatccggcgccatcgtgcggctggcctaccgctgtatcgcttgctttcggaatatcataaggcataatctcgtagctatagggatagaagaccttattttctggataggctctgccatctatatctttgtgcagatttaccatacaagtgatggtagtataaggtggcattttgcactaggtgttgtgctgggggcagttttgatgacggtttttttagggcggctggaaaaagtgtacaaaaaaatctacacgcgtaagaagaaggattttccccaaaagtcttgattaaaagaaggaaaaaagttaatatattattattaattgggtgagtatagtcggcaggggtgccgacgtaagggtgagtaattatatgaatggaattaaacaaaagagccgtagaaggcggcagaaaaaacgcatacagcgacacaagagaagcgtgctggcggtcagcaccgtaattcttctgttgatagtggtggtatccgcaagcagcatgacgctccgtgcaagggataagtcctatcaggcacaggagatggaactgaaggagcagataaaggaagagacggcacgcaaagcagagatcaaggatcttgagaagtacgtgggaacagatgaatatgtagaagatgttgccaaagacaaactgggtctggtacatgagaatgagattatatttaaggcaaaataataaacagatgataagctttaggaagtaggtttcctaaagctttttctttgtctgggagaaatttgtctaataaccattgaaaggggagcaaagaatggcggaggtaaaagagaaagagacttttgtgaatccttatgtcatacagatggacaagttcgcggattcactgatgcatctgtcaaagacatttctgacattggaggattataaggggacctttaccaaggatgagatcgaggagatgttcctgaagattacggacaaggtctgcgagaactgtgaaaagaaagaatggtgcttgggagaaaaccgggtccatacttatcagatgttgtatgagattctatgcgcggtggaagaatatggagcggaactgaatattgaattgaagcggaaactacagaagaaatgcatcatggctcccagatttttaagggagacgctggaagtgttcgaaaatgcgaagcagatattgatgtggaacaacaagattgttcagaatcgggaaggatatgccgtgcagctgaatagttttgcgaagatgatccagtataccaccagggaattggatgcgggcatattcgaagatgagcatcttgagaaacggttgaagaatcagttaaagaaatgcggggtaagaatgctgtccgcagtgttctatatgacgcctcagggaaagtatgagatccatctgacggtgaaggctatgaaggggcagctgatagccaccaaggagtttgcggcgttggtcggaaactgcgtgggaagagtcatgatgccggaacaaggagaacggcccattataggggaagagtactgcacggttgcgtgcgtggagggcgccagataccataccttgcagggcgtggcgaagatcgggaaagggtgcgagaagatctccggggatacgttcctgatgacggaccttccgggcggcaagaaaggcatcgccttatcggatggaatggggtcgggcgaagaggcttttcgggaaagcacgatggtggtagagatgctggaggaattgctggaagcagggttccctgtaaagacggccgttcagatgatgaatacggctctggtgatcggcagggaagaagtgcgtttttccacgatagacgtcagcctgtttgatttgtacagcggcacctgcgaatttgtaaaggccggggcatcaaccacatttatcaaaaggaaggacgcggttgagaagatctgttctacgacgctgccaatcggggtcctgcaggatattgagattgatatagtgacaaagagccttgcgtccggggactatgtgatcatggtgacggatggcattatggacgcgctgcctgtcggagagcaggatgcgctgatgagcacatttatcctggattctaatatcgtgaatccaaaagagatggcgcaccatatcctgggacaagttctggaatggaccggggaagtccccctggatgatatgacgatattggtagtgggaatgtggaaactgtaagggaaacttgctttttaccgggaaattctatatatttaaaaggaacaaacgaattactaacataagaaggattatgctatgtatcataaggtaaaggcgtatatagagaagtaccatatgctggatgaaaaggataaggtgattgtaggcgtatcaggaggggcggactccatatgccttcttttcatgcttatccaattgaaaaaggaaatgggcctgtccgtagaggcggttcatgtacatcacgggctgagagaaaagaccgcggatgcggatgcggtctatgtaaaaaaagtatgcaaagagctaggaatcgggcttcgcttatattatgaagatgtaaaatcctttgctttgtataataagatgagcgaagaagaggctggcagatatgtaagaaggcggattttcaaggaagtcctgcaggaagcgggagggactaagatcgcccttgcccatcatcagaacgacaacgcggagaccctgctgtggaatctgtgccggggatgcagcctgaaaggaatgggggggattgcgcctgtagacggcgtatttattcgccctcttttgtgtctaaaacgggaagagattgaatcatatctggtgaatcggggaatatcttattgtacggatgaaaccaatcttgaggatagccataccagaaaccggatccgcaaccatgtgataccttatctggaagagcaggtaaatgagagggcggtttcccatatgtcggagactatggaacagatgagacaactgtggaaatatgtagagtcagaaactacgcgttacgctgccagatgtataaaggtgtcgaaagaccaaacgcggagggtgcttcttaaggcggaattcatccttgtgcccgaggcgctgcgctcctatgtgcttcatgaatgtatatgccaggcggccggggggcgcaaagacattgagtccgtccatacaaagatgttgtcagaactgctggataaccaagtgggacgccaggcaaggctcccctatggaatcgtggcagtgcggcgctatgagggaatcgagcttcgcagggaaggcgatggacgtccgaaagaccagaacccggaagggcttatgaagatgcgaacgctgccaagaacgtcggggaaagtaatatttccggaaaacccctacacgaaatggtttgattatgatataataaaaaatactgtaaaaatcaggcatagggagccgggagactatataacgattgataaaaacggcaaaacccagaaactgaagcagtattttattaatgaaaagattccacaggaggaaagagaccggatctggcttatcgcggatgggaaacatatcatgtggattgtagggtacaggcagaaccagcagtatcagatcacagagaataccagaaggattctggaaatagaattttgcggaggatgaaaagatggcagaaacagttagagtattgattgaagaggatgaagtcgcgaagagaattgaggaactgggtaaaaagatcagcaaggattatgcaggaaagcaggtgcacctgatctgtgtcctgaagggcggagtattctttatgtgcgagttggcaaaacggatcagcataccggtttccatggactttatgagtgtcagcagttatggagacggcacgtcgtcaagcggcgtggtaaagattgcaaaagacctggatgagacgctggaaggaaaagacgtgctggtagttgaagatattattgattccggaaggacgctttactatctgcttgacatcctggccaagaggcacccaagcagcatgaggctgtgcacgcttcttgacaagccagagagaagagtgcgcgacgtgaaggtagactacgtgggattcgagataccggatgaatttgtcgtaggctatgggcttgactatgcgcaaaaatatagaaatctaccatacatcggggttgtagaaggtgtggagtagaaaggggctataaaacattgaatgacaagaagaccagagggctgagcggagccacggtgctgatattcgtagtgtttctgtttgcagcattgtggttcacgaatcagtttgaccaaaaagataaagaattgacatggaaggaatttgagaagcttatcgtcagcgataatgtggaggctgttaccgtcagccagaataaaaatgttccgacagggcgggtagagatccaggttgatacaaagaatgatgaagattccgtaaggtatctgtatgtatccgatgtcaatgagattcagaattacctgaaggaaaagaagattgactacgagatgccggacgtgccgcaggacagctggttcgcaacgacgatcgtgccgatgcttctggttctgggaggagttctgctgatattcctgctgatgaaccgacagggcggaggggccaacgccaaggccatgaactttggcaagagccgcgcaaggcttagcacagatgtggaaagaaagatcacattcggacaggtggccggcctgaaagaagaaaaggaagaactggaagagatcgtggactttttaaaggccccgaaaaaatacatccaggtaggcgcgaggattccgaagggagtccttctggtaggccctcccggtaccggaaagaccttgcttgctaaagcggttgccggagaggccggggttccgttctttaccatctcaggctctgactttgtagagatgtttgtcggagttggcgcgtcccgcgtaagggatctgttcgaagaagcgaagaagaatgcgccatgcattattttcattgatgagattgatgccgtggcgagacgccgcgggacgggaatgggcggcggacatgatgagagagagcaaacgctgaaccagctgctggtagagatggacggcttcggcgttaatgaaggaatcatcgtaatggccgctaccaaccgtgtagatatcctggatcctgcaatcctgcgccccggccgctttgacaggaaggttatggtaggccggccggatgtacagggacgggaagagatcctgaaagttcatgcgaaagggaaaccgcttagcgaggatattgaccttaagcagatcgcgcagacgactgccggatttacaggagcggatcttgaaaatctcctgaatgaggcggcaatcctggcagctaaggaaaacaggatatacctgaagcaggaagatattaagagatccttcgtcaaagtagggatcggcgccgagaaaaagagcaggatcatatccgataaagaaaagcgtatcacggcattccatgaggcaggacatgcgattctcttccacgtgctgccagatgtagggcctgtatacagtgtctccattattccaaccggcggggcgggaggctatacgatgccgcttccggaaaatgatgagatgttcaattcaaagggcaagatgctgcaggacattacggttgcccttggcggacgcgtggcagaagaagaagtatttgacgacatcaccaccggggcctcccaggacattaagcaggcgacgagcctggcaaaatccatggtgaccaagtttggaatgtcagaggcccttggcctgattagttatgatgacgatagcgatgaggtgttcattgggcgtgacctggcgcatacatccagaggatacggggaaggcgtggcgactgtcattgaccaggaagtgaaaaggatcatagatgaatgctatagcagagcaagacatattatcaagaaatacgatgatgtgcttcactcatgcgcagaacttttgttagaaaaagagaaaatctctagagaagagtttgaatcattatttacaggggaagtatctgaggcataaggaaagaataatgaattagagagggtttggttgcatgaaggaacaagctttgttttgtgatggaactgccagttatgtcaacccgccgcagccggcggagaatgaaacaataacgctgcgctttcgcacggcaaaagatgatgtagatcgggtgcgtctcatgacgggcgtcggcggatatgatatgaagaaggaaagcagcagcggcgaattcgactactatacgatcaactggcgtttgaatgaggagcctttccggtattgctttgaaatccaggatggtgacgagctttgttattacaacaagtgcggcacgtcaaaagaaatcgttgcattttatgaatttgtcattgtaccgggattttctacgccggattgggcaaaaggggcggtaatgtatcagatttttacagaccggttctataatggcgataagaccaatgatgttgagtccagggagtatttttatataggagattacagcaggaaggtaacagactggaataaatatccggataagatgggagtacgggagttctatggcggggatttgcagggagtgatcgataaactggattacctgcaggatctgggcgtggaagtcctgtacttcaatccattgtttgtctcgccttccaaccacaaatacgatattcaggattatgattatatagacccgcattatggggtgatcgtggaagatgggggagaagtcctggcagaaggcgtgacggagaatcggcttgctgcgaagtaccagaaaagaacgacggatattaagaatctggaagccagcaatcagttgttcatcaagctggtagaagaacttcacaggcgaggcatgagaatcattcttgacggcgtgttcaaccattgcggctcatttaataaatggatggacagggaacgcatttatgaaaatcaggaggattatgagccaggagcatttatttccccagacagtccttacagaagttatttcagattctttaaggaggagccgggaaattggccgtacaattctaactatgacggctggtgggggcatgatacgcttccaaaattgaactatgaagattccatgaaactggagaattatatattatatattggaaggaaatgggtatccccgccatataatgtagatggatggcgtctggatgtagcagcggatctggggcgaagcaatgagtacaaccatcagttctggaagaaattccgcgaggcggtcaaggatgccaatccagaggcgattattcttgccgagcattacggagatcccagcgactggcttcagggcgatgagtgggatacggtcatgaactatgacgcctttatggagcctgtaacatggttccttacagggatggagaagcacagtgatgaagcaagagaagaactgcggggcaatgcggataactttgtgggctctatctcccatcatatgtctaatatgctgacgccatccttgcaggtggcgatgaacgaattatcgaaccacgatcattcgcggttcctgacccgtaccaatcacatggttggaagggtagagcacctggggccgaaggccgcggaagaatatgtgaatgaggcgatcatgcgggaagctgttgcgatacagatgacgtgggtaggggcgccgaccatctattatggagatgaagcgggcgtgtgcggattcacagatccggataacaggcggacatatccctggggacatgagaatcaggaactgctgaatttccataaggagatgatacggatacacaaggaacatccggcgcttcgtacaggatcccttaatatactgagctgggatgaaaatgtgctggcatatggccgtttcctgggtgaggaccgtattgtggcaattattaataaccggagcgagcttacagaggtcacggttccggtatggcgggtggaagtgccaataaaatgccggatgaaaaggctgatctattcctattcagacggctatacgatagaagatgaagaatatctggttgacgaaggggaagtcgttgtaaatatgggggcgcattctgcgcttatactgggaatgaaagaagcttgaggctcattaaaatatcatggaagaagattatggaaaatattaccataatcttcttttgcttttatcggttatcatagatgaaaaggcaaggaggaggaaatgggtaaaaaaacatatggttatgtgcgggtatccagcagggatcagaatatagaccggcagattgcggcaatggagaagattcccatccgcaaggaggacatctacatagacaggcagtcgggcaaagactttgacaggcccagctaccgccggctcttgaatcgcttaaggcccggggataccttgttcgtgaaatcaattgacagactgggaagaaattatgatgagattattgagcagtggaggacacttacaaaagcgaaggacgtggatatcgtagtgattgattttccgctgctggacaccaggaaccatgtgaacgggctgactggcaaattcatatcggatctggtgctccagatcatgtcctatgtagcccagattgaaagggagaatatccggcagaggcaggcggagggaattgcggttgcaaaattaaaaggggtggcatttggaaggccgaggaaagagataccggaagaattcccggatgtggtgaaactttgggagaataatcaaatcagcatgagggaggcggcaaggaggctgggaacaagccatagcatgtttgcaaaatggatttcccaatgccaggataaaaataaatgttaaaatttggcagattatgtagacttttacatccattgtttttggaggtctaatgcctctcttgttacttatatatatacaaactgctattaaaaatataacattagtggattaaaaagtctgatttttagtccattttttgttggataatgggatgaggataaatatgtcgccaaaaagaaagaacatagaattaattgaattattggcagaacaggcaggctgcacgtacctgtcggatttgcggcttgaggactaccgttgtaggctggaaggctgtctccagaagatggatatagaacgctatggagaggaagagtgggcggaagcggccaattacctgacaggcactcccaaagaagaaattgctacgaaggttcaggcaaggcgattgattcttgaaaaatgcaggaaagaataaagaagaactgaaggcggataagaatacacgctccagttcttctttttattttgtcataacctcgacaccgttctcggtaatcaataccatatactctatctgcgcggacagcccgtcgtcgatggtgtagacggtccagccatttccctcgtcaatatagaattcagggcttccttcgttgatcatgggctcgatggtaaacatcatgcccggcacgaggaccatttcactgcccttgggggtcacatagctgacataaggatcttcatggaattccaggccgattccatggccgccgatatcttccacgacagaaaagccattctgcctggcatgggtattgatggcataagcgatatctcccaaatgtccccatggctttgccgcctttaagccaagttccacgcattctttggtgactctgacgagcttctcagcctcaggggatatctgtccgattgtaaacatccgggatgcgtccgaataatagccattcagaatagtggatacatccacattaatgatgtcgccctccttcaggatctcgttttcatcggggattccatggcatatgacattgttgacggatgtacatacgcttttggggaatccctgataattaaggggcgccgggataccaccgtgctgagtggtatagtcgtataccagccggtcaatctcttccgtactcatgcctttacggatatgggcggcaacatggtccaggacggcagtattcaagtccgcgctttcctggattgccttaatctgctccggcgtcttaagcaaagagcgatccggcacaatctgtccctttgcggccaaggtccatagttttacgtctagtttatccacaatattacctaccttcttataaaaatatccatatgtttcattatatcatccctgtcaatggggttgtttgttaattgaaaataagttataattttattatattatgtgctaaatgcgggcatgaatataagtttaaaatataggaaaatatttggtcgtgaaaggagcggacgtatgttaagaataggaatgcttacaagcggaggagactgccaggcgctgaatgcggcgatgcgcggcgtagtaaaaggaatctgctctaaaagagatgatgtggaaatctacggatttcaggaggggtataaaggactgatctattcgaatttcaagatgctgacttccagggacttctccgggatattgacgattggcgggacgattcttgggacatccaggcagccattcaagctgatgcgcgttccggatgagaatggccttgataaggtggaggcgatgaagcatacgtaccacaagctgaatctggactgcctcgtagtcctgggaggtaatggaacgcataagactgcgaatatgctcagagaggaaggcctgaatgtcatcacgcttccgaagacgattgacaatgacttatgggggacggatatgacctttgggttccagagcgcggtggatatcgcgacggatactattgacaggatccatacgacagccacatcccacagccgggtattcatcatcgaggttatggggcacaaggttggctgggtaacgcttcatgcgggaattgcaggaggcgcggacattatattgctgccggagattccatacgatattgatgtggtggtggaagcaattaacaagcgcaaggccgcaggaaagaagtttacgataatcgcagtggccgagggagcaatatccagggaagacgcgaagctttccaagaaggaactgaaggaaaagaaggcgaagcagaaatatccttcggttgcctatgagatatctgaaaggatccagaagaagacagaccaggaggtacgcattacggttcctggccatacgcagcgcggcggctcgccctgcgcgtatgacagggttctggccacgaggcttggagcggcagctgcggaagccatactggatggagactttggctgcatggtggctgtaaagaacagggatattgtccgcgttccgctcagcgaagtggcaggtaaattaaaatacgtggatccggaatctgatattgtcagggaagccaagatgacaggaatcagttttggagacaaataaagcagacagggagtgtaagaaatgtcatatacggcattgtaccggaagttccgtcctgacgaatttgaagacgtaaaaggtcaggacgccatagtaaagacattgaaaaaccagataaaagcagaacggattggacatgcgtatctgttctgcgggacaaggggaactggaaagacgactgtggcaaagatatttgcgaaagcggtaaactgcgagcatccggtagatggaagcccatgcggggaatgcgccatgtgcagatcgatcgccgcgggcacgtctatgaatgtgatagagattgatgccgcgtccaacaacggagtggacaatatccgcgagatccgcgaggaggtggcgtaccggcctacagaaggaaggtacaaagtctatattatagatgaggtccatatgctttctataggagcattcaatgcgctgctgaaaacattggaagagcccccggaatatgtgatatttattctggccacaacggaagcccataagatacccattacgattttaagccgatgccagcggtatgatttcaagagaatatcgattgagaccatatccgacaggctccgggaattgattgacaaggaggggtgggaggtggaggaaaaggccgtgcgctatattgcgaagatggcggatggctccatgagagactccttaagcctgctggatcaatgcgttgccttctacattggtgagaaactgacctatgatcatgtgcttgaagtgctgggagctgtggatacggagacattcagcaggctgcttcgggaactgctttccatggatgtgcataaggtaatagtgacggtagaagaactggtgatgcaggggagggaactgtcccagctggcatcggatttcacctggtatctgcgcaacctgctccttgtaaaaagttctgacaatatggaagatgtgctggacgtgtccacggaaaatctggcccagttaaaagaagaggcccagatgattgacaatgacacgctaatccggtatattagaattttctcggaccttaccaatcagttaaaatacgccacccagaaaagggtactgctggaggtaacgctgataaagttatgccggccggccatggatcagaatcaggatgcgcttcttgaccggatcaggctgattgaaaaacagttagaagaaggacttttagacagcgctgtaagggaaaaggtagtctatgtcaactcggatggccccgcagaacagaaagagaagccaaggcccgaactgcccaaggcgctaaacgaagatgtaaaggcagtggtccaggacttccgcaccattgcaaatgacgcatcgccgcttcttcgaacgtatttgaagaaagccaggctaagcccgggagagggcagccgcctgctcatcgtacttccggacgaagtaagcgccgctgcggtggggactgcggagcataaagaagagatagagaggctcattgaagaaaagataggaaaacaggtcgatatagaagtccggcagttggaagaaggccgaaggtttgaggatagtttcgtggatcttgagaatttgatccatatggaaataacagtagaagattaggaggatatgaagatggcaaaacgtggaggatttccgggaggaggaatgcctgggaatatggcaaatctgatgaagcaggcacagaagatgcagcgtcagatggaagaacaggcaaaagaaatggagacaaaggagtttactgccactgccggaggcggggcagtagaagtaacggtatcaggaacgaagaaggtattgaaggtcaagctggacgaggaagccgtagatccggatgacgtggagatgctggaggatctgatcgttgcggcggtgaatgaggcgatggataaggtggatgaagtgtccgcgtcagccatgtccaagtttacaggcggcatgggcggacagatgcctggattgttctagcagggagcgtaagaaatggattattacagtagccagatgagcaagttaattgaagaattgtcatgcctcccgggcataggttcaaagtcagcggcaaggctggcttttcacttgatacacatgcccctggatgacgtaaaaaggctggcatccacgatggtcgaggcgcgggagaatgtcagatactgcgcgcagtgctatacgctgacggatcaagaactttgcccgatctgcagtaacagcggcagagatcacaagacgatcatggtagtagagaacaccagagacctggcagcatatgaaaagacagggaaatacaacggcgtgtaccatgttctgcatggggcgatctcgccaatgcttggcattgggccggaggatatcaaattaaaagaactgatcgagcgcttgcagggggacgtggatgaggtgatcatcgccacgaattccagcttggaaggggagactacggctatgtatatcagcaagctgatcaagcctacaggaatcaaggtcagtaggattgccagcggcgttccggttggaggagacttggagtatattgacgaagtgacccttttgagggcgctggaaggcaggacacagttgtaaatgcaaaagggggcgggcaattaattgtggattgacctgtccccgttgaggtgataagagagaatgggaaagaaaaaagttacatctacagatatcgcgagggccgccggagtatcgcaatctaccgtctccatggttctgaacaaaaagtacaatgtatctttttcaaaagaaactgtggaaaaagtcgagaatgccgcgaaagaattaggatatgtccctccgaagcgcaagacgaaaaaaggtgccaggcaggagaaacttttggtgatcttttgttccaaccttacgaacccttattatgtcatgctgcttcagggaattgagtccagggcaaaagagcagggattcggcctctttgtctgcaacacccagagggatttgagaatggaggagcggtatcttaaaatgatgtgggaattgcgccctctgggaatcatttacacctgcaacccaagccactgcttcatggatctgttgaaagaactgtctgaaaagattccggtggcagtcattaacaaccagaatgagaagatgagtgtggatgcagtggaactggacaactccaaactaggaagaattatggcacgccatcttctggaacttgggcatcggaaggtggcctatatcgcgccacctcttacagcccggcagaagcagcgctccaagcgcgtggaaggatttctgaaggtatatgagcaggccggcctcagggatcaggtgattatcaaggccgcgagggaagagttcgatcaggatgtggcccttattgattcggaatataagatcggctatgatctgacccgcgaacttttgcaggagaccagggatattacggcgattgcgggacttaacgacatgatcgcctttggaattatggatgcgctccatgaggcaaagataaaggttcctgctgatatgtctgttatgggatgcgataatacgctgtttgcccgtatgcataaggtggaattgacgaccattgagcattttgtcatatttaaaggacgggacgcctgcgatatcattatgaaaaagatagcctcccaccacacccagtattcagagacccctcccatcagcacttatcatgtagagtatgagccaaaactgatcgtgcgggggacgaccgcgtatgccaaagggaaaaagaaaaaataaaattaatttattccaggaaattattattaataataaagtggcaaaaaataaaaagcatagtaaaatcattggaataaataattttttaaagaaaatcagaagaaaaattacttgtatgtaattaataaaatgtagatattaatagaaaaaattattaataaatcttatgcgctattgaccaaacttcatcctataagttataattctagcatgtggcaaatagcggaaagtgaagggattcacggaatttaaaggaggaagaaaatgaggtttttcattgacacagccaaggtagaggatattaagaaggcgaatgatatgggagttatctgtggcgtaaccaccaacccatctctgatcgcaaaagaaggaagagtatttgaggaagttatcgcggagatcgcgtctatcgtagacggaccgatcagcggagaagttaaagcgactacagttgacgccgaaggcatgattgcagaaggaagagagattgctaagattcataagaatatggtagtaaaacttccaatgaccgttgaaggcttgaaggcatgcaagcagctgacatccgagggaatcaagacgaatgttacattagtatttacggctaaccaggctttgctggcagcaagggctggcgcaacttatgtctctccattcctgggacgtctggatgacatttccgtaagaggaacagatctgatagcagagatcgcgcagatctttgatgtggcaggaatcgagactcagattatagcagccagcgtacgtaatccgatccatgtaacagactgcgcgctggcaggagccgatatcgcgacggttccatatgcggtgatcgagcagatgaccaagcatccgctgacagatgcgggaattgcaaaattccaggctgattataaagcagtatttggcgaataatccatcatacagacaggaggagcatcatgaacaaatttgagttaatgaagactgccaatgagatccgtaaaggcatcgttacggcggttcacagcgctaagtccggacatccgggcggatctttatctgcagcggatatctatacatatctgttttttgaagaaatgaatatcgatccgaaagaccccgaaaaggcagaccgcgaccgttttgttttatcaaaaggccacactgccccgggatattattcaactttggcaaacagaggatttttcccggtagaggaccttaccacattgcgcaaggtgggatcttaccttcaggggcacccggatatgaagcacattccgggagtagacatgtcaagcggctctctgggacagggaatctccgcggcagtcggaatggctatctccgcgaaattatccggagatgactaccgtgtatatacgctgcttggagacggagagattcaggaaggacaggtatgggaagcatccatgctggcagcacaccgcaagttggataacctggtggtcatagtagacaataacaaccttcagattgacggagccattgatgaggttaactccccatatccgatcgataagaagtttgaagcatttaatttccatgtgatcaatattgatggccatgattttgatgctattgacgctgcctttaaggaggccagagccaccaaaggacagccgacggctattattgcaaagacaatcaaaggaaaagacgtttcctttatggaaaaccaggcttcctggcacggcgcggctccgaatgacgagcagtatgcggttgctatggcagacttggagaaagtaggtgaagcattatgtcagaagtaaagaagattgcaacaagagaaagttacggtaatgctttggttgaattaggaaaagcccatgaggatgtcgtggtactggacgccgatctggcagcagccacgaagacaggtacttttaagaaggcttttccggagcgtcatattgactgcggtattgctgagtgtaatatgattggagtggcagcgggcattgctgctacaggcaaggtgccgtttgcgagttctttcgctatgttcgcggcaggacgcgcattcgagcaggtgcgtaattctgtaggctatccgaaactgaacgttaaaatcggcgcgacccatgccggaatctccgtaggagaggacggcgcaacccatcagtgtaatgaagatattgccctgatgcgtacgatcccgggaatggtcgtaatcaatccgtccgatgacgtagaggctaaggcggcggttgaagcggcttatgagcatgtgggacctgtatatctgcgttttggaagacttgctgttccggtaatcaatgatcatgcagattataaattcgagcttggaaaagcgatcacgcttcgcgagggtacggatgtgacgattatcgcgaccggactcccggtatctgagtccctggcagcagcggagaagttatcagccgatggaatcagcgcggaagtaatcaatatgcatacgatcaagccgttggatgaggaggctgtcattaaggcggctgccaagaccggaaagatcgtgacggtagaggagcactcgatcatcggcggactgggaagcgcggtctgcgacgtggttgcggaaaaagcgccggcaaaggtaatgaagattggaatcaatgatacttacggagaatcaggcccggcagtagaattgattaagaaatatggcctggatgcagacagcatctatgaaaaggtaaaagcatttgcaaaataattaataggttatagaaaaaagcacatcctgggcggggtgtgctttttgtaattttgaattgcattttagaaaggatttacaatcttaaatgaaagtgttacgatatagaaaccagaaaaagagagagatgagataaaggaggtagtcgttgtgcaggcagcgattacctttttaggagagaatgcgatgtttggaagagtaggcgaaatggctaagcggcgcttaaacagactgcgccgcaattggaagagtgaattttatagcgaagttaaggatatagcagagcatccggtggtgctaaggatgaaattatatcctcatcatggcagcacaaactgttatcagcattgtatgaatgtggcatattacaattaccagtggtgcaggttcctgcacctggatgcaagatcagcagccagggcagggatgatccatgatttgttcttatatgactggcatatgcatgccaagaagacgggggattgttttcacgggctgacccatccgaaaaagtcttaccagaatgccaggaaattttttgatctcaaccacattgagaaggatatcattctgaatcatatgtggccggttacattttttaagatcccaaggacgaaagaaggatggattacgacgcttacagacaagtattgcggcgcctgcgagactagccgtcgaaaataatgggatctaccgggaacctgccggaaatttccatggacaagccccaccaaccgctaaaatatgcggattccatatgctatcataagcaaaaatatgcagatgaggtgagagtatatggaaagacaatttcccaaaaatgtaagacagataggaaacgtaagcgacgagcctaagatatatgtagaagactatgtggatacctatctgaaccagctgcgcgaaagagcagccgaagagccggtaggagtcatgcttaccggcgagatcctgatccaggaaggacaggccgtggtatatgcttccggcgctatacgaatgaaggaaattgaagtaaatggtacggaaatagtaataggggaagatacgtttaaggaattggaggaagaacgcaagcagtattttccgtccagcgatgcggttggatggtgcctgatcgagaatggacatcctatggggcagaaccgccagatagcaaaaatacacgagaaatcatttgcaaagtcagataccgtatttatatggaaggatgcggtagacaatgaagaagtctattatgcatacaaatatggcgaactaatgcagatgggcggacattacatatattatgaaaagaatcccaatatgcagaactatatgatcagcacacgtaaaaagattggcgttacacccagtgaagtggttgaggatcgagctgcaaaggattttcgtagtgtcgtaagagaacgcatggaggataaagaacagcgccagagttccaggcttgtgtacgttacaagcgcgcttctggtagtggtagttcttgcgatcggcatctcaaccgttaataattttactaagatggaggcagttcaaagttcgcttgaatcattgtcccagtcggccagcaagacggagagccagaccgggacggtgaatgaaggcgaggacggggccttggaggcaaacgggattattggagacggggaggcaaaagataaggaagcctccgggggaacagttccagaaacatctaccgtccaggaacagttaagcgatgaggattattatgtagtgagaaaaggggacacgctggacagcatcagcataaaggtgtatggagatgcctctcatgtagaggcgctctgtaaaatgaatggattgtcagatggcaacctgatatacattggccaaaaattattgttaccatagctggaaaatatgatataatgagcccaaagtgcgtaaggatgcattaagcatctttgaattatgacacgaatgaaaaggaacaaaggggaaacagatgatacaccgaagaaataagaaccttcgcgttgtcagagaaccggaaaatccagcagacccgacagataagattattgagcagattatggatgaacttaacagtgaagatggttcgatgaatgatatggaggaacagattaaaaagcataagatcaagttctggcgcaggattatactcagcacggcggcagtattggcggttgcggccggcatatatcttctggtcaatcttcagacttacagcaaggcccggactttggacacctatgcaagcggcggctcggcgaacaatagttatatgcagtttgcggatggcgtgcttaagtacagccgggatgggattgcctatctggatcagaagggcgaggaacagtggaatcatgcctatcagattcagaacccttttttagacgttaacgagaaatcggcggcaattgcagacaagggcggcaatgacatcattgtattccaggaagatggcctgaaaggagagatccatacgacgcttcctatagaaaagatcaatgtctcagagcaagggattgtgggcgctattctgaaaaatgacgcatcagccaaagttatgtgctatgataccgcaggaaatgttcttgtggagcacaagacgtccttaagcggaacgggatatccgctggatgtatcgctgtctgaggatggagaggtcatgcaggtggtttatctttatactcaggagggtaaaatcacctcaaaggtagcctactataattttggcgaaaagggagaggataagacggatcatcaggtcgctcttaccgagtatgaggatacggtcatggcatccgggttctttcttaataagtccacctccgtagcaatcggcgacaactgccttgccatatataaaggaggcgaggttccaaaagagtcttctaagattatgatcgacaaggagatcaagagcacattccataatagcaaatatatcggcatgatcctcaagaatgaaggcaaggaaggatatgagcttcggctttacaatgccggagggaagatggctatgtctgaagattttaccggcgactataagaatgtgaaaatctgtggaagccaggttattatgtatgatggaaagaaatgcggcatttttatgagaagcggcgtgcagagattttccggagagatggataacaatatattagaaatatttcctgtagctggagtaaataaatacattgtgatgaatgcaaacggaatggagaaggtccggcttgtaaagtaaggagaacttatgaattggttattaataacagtaggcgctatttttctgataagcattattgtcggcatatgcaaaggcgcaatcaagatagcggtttctttggccacaactatagtgactttgttcctggttttctttgcaacgccttatgttgctaaagcaatcgcaaaatatacgcctcttgatgacctgatcaagagccaggtggtcagcacgatggcaaatgtggcaacctcccaggttacaggggaaagcggcgggctctccgagagcagcgtaagaaaggttctggaagcggcaggggtcacagaggacatgctgtctcagtacggcatttctatagaagatattgtgaatggcagcattagcagcgaggatcttgccaagtatggaatctcaagcaatgtgctggatggcttaagcgacgataaaaagggatcgattgaagatgcgatcaatgaggctgagataccaagggatgtacaggtcgccgcgattgagaaggctgatttgccggatgtattcaagaacctgctttcggtaaataataatagcgagatatataaggaactgggggtagatacctttgcccaatatgtgggaagctatctggccaggctcattatcaatatcgtggcctttctatgtacgttcgtattaataacaatagtcctgagggcgatcgtgtttgctctggacatcgtatccaatcttccggtgctgggatttataaaccgtctggccggaggagcgataggggtgataggagcgctggtcatcgtctggaccgtatttgtggttattacgcttctgtatacgacatcctttggaaaggaaatgtatcggatgattcaatcggatgcaattttgaagacgatctatgagtataatcctattctgaaactggctacaatttttaggtaaaaaagttggacaaacctcttgacactgaaaatgaaagatgctattatataattccaccgcggagacgtggtggatttttaagcggtctaggccggatggctgaaaagagccgctgagaaaaaataaaaaaagatatcaaaaaagtgttgacaaaatatggaagcatgtgatatcatttagaagttgtcgcttgagacaacaacctacagaaccttgataattgaacaatagacaacaaccctgaaaatttcttgtaaagagagaatttcagaacagaacgggacatcgagagatgtccgaccttaaaacagtaataacgggaaggaattagccaagagttagttctgaccgcgatcacaacttttaacgagagtttgatcctggctcaggatgaacgctggcggcgtgcctaacacatgcaagtcgaacgaagcgcctggccccgacttcttcggaacgaggagccttgcgactgagtggcggacgggtgagtaacgcgtgggcaacctgccttgcactgggggataacagccagaaatggctgctaataccgcataagaccgaagcgccgcatggcgcggcggccaaagccccggcggtgcaagatgggcccgcgtctgattaggtagttggcggggtaacggcccaccaagccgacgatcagtagccgacctgagagggtgaccggccacattgggactgagacacggcccagactcctacgggaggcagcagtggggaatattgcacaatgggggaaaccctgatgcagcgacgccgcgtgaaggatgaagtatttcggtatgtaaacttctatcagcagggaagaagatgacggtacctgactaagaagccccggctaactacgtgccagcagccgcggtaatacgtagggggcaagcgttatccggatttactgggtgtaaagggagcgtagacggcaatgcaagccagatgtgaaagcccggggctcaaccccgggactgcatttggaactgcgtggctggagtgtcggagaggcaggcggaattcctagtgtagcggtgaaatgcgtagatattaggaggaacaccagtggcgaaggcggcctgctggacgatgactgacgttgaggctcgaaagcgtggggagcaaacaggattagataccctggtagtccacgccgtaaacgatgactactaggtgtcgggtggcaaggccattcggtgccgcagcaaacgcaataagtagtccacctggggagtacgttcgcaagaatgaaactcaaaggaattgacggggacccgcacaagcggtggagcatgtggtttaattcgaagcaacgcgaagaaccttacctgatcttgacatcccgatgccaaagcgcgtaacgcgctctttcttcggaacatcggtgacaggtggtgcatggttgtcgtcagctcgtgtcgtgagatgttgggttaagtcccgcaacgagcgcaacccctatcttcagtagccagcattttggatgggcactctggagagactgccagggagaacctggaggaaggtggggatgacgtcaaatcatcatgccccttatgaccagggctacacacgtgctacaatggcgtaaacaaagggaggcgaacccgcgagggtgggcaaatcccaaaaataacgtctcagttcggattgtagtctgcaactcgactacatgaagctggaatcgctagtaatcgcgaatcagaatgtcgcggtgaatacgttcccgggtcttgtacacaccgcccgtcacaccatgggagtcagtaacgcccgaagccggtgacccaacccgtaagggagggagccgtcgaaggtgggaccgataactggggtgaagtcgtaacaaggtagccgtatcggaaggtgcggctggatcacctcctttctagggaagagaagaagtaagggctgctgtctattgttcagttatcgaggaatgctggagaagccggcttgctgcgtcagaacagcatggcacggatttcctggcggcgatacgcccgggggcaacacccgttcccatcccgaacacgatggttaaggcccgggcggccgatggtactttactggagacggtacgggagagcaggtggctgccaggatttaaaaaaagagaagggcagatgcagatccgctgcagatgttcgggatcagatagataccggcagggacgggcaacaacccgcagagccgaccccatcagcagggcagtgctgttaagatagctggtcttaccagtgattagaggtcagaagcgcattctggtttctaatggctgataaagcgtcagccgcgcatatgtaccttgaaaactgcatacatggaaatacaagaatgatcaagaagaatatctagatcaagacatccgaggtaatcgcggaagcgattattcagaacaaaccagattcgaggcaacgaatagaaaaaatgccgactggccaacgccggcaacgctatgccgacgtaggatcgaagcgccgcccgtgcgcttaagtccgcttggtcatgctagaaagagcatatggtggatgccttggcactaagagccgatgaaagacgcgataagctgcgaaaagcttcggggaggggcaaataccctttgatccggaggtgtctgaatggggaaacccgcatgaggagccctcatgcatccctgcgccaatccataacgcagggaggggaacccggcgaactgaaacatctaagtagccggaggaagagaaaacaacaagtgattccgtaagtagcggcgagcgaacacggaggagcccaaaccggggcgcgtgcgccccggggttcggaccgcggaagtgattcgggaaggctagcagaacggctttgggaaagccggccagagagggtgaaagccccgtaagcgaaagcctgacagacacggcggtatccagagtaccacgagacacgagaaaccttgtgggaagaggcggggaccaccccgcaaggctaaatactccttagtgaccgatagcgcatagtactgtgaaggaacggtgaaaagaaccccgggaggggagtgaaagagaacctgaaaccatatgtttacaagctgtggaagggccttacgtgcccaaccgcgtactttttgtagaacggtccggcgagttacgccggctggcaaggttaagggctaaaggcccggagccgaagggaaaccaagtctgaagagggcgaaggagtcagccggagtagacccgaaaccgggtgatctatccatgtccaggttgaagttgccgtaaaaggcaatggaggaccgaacccacatccgttgaaaagggtggggatgaggtgtggataggggagaaattccaatcgaacccggagatagctggttctcctcgaaatagctttagggctagcctcatacgagtcttgcggaggtagagcactgaatttcctagggggcgtcaaagcttaccgaagaatatcaaactccgaatgccgcgtagatgatgtatgggagtcagactgcacgagataagttgggcagtcgaaagggaaagagcccagacctgcggctaaggccccaaaatgtgtgttaagtggaaaaggatgtgggatttcgaagacaactaggatgttggctcagaagcagccatgcattcaaagagtgcgtaatagctcactagtcgagaggtcccgcgccgaaaatgtccggggctgaaacacactgccgaagcccagggatgtaccaagtacatcggtagaggagcattggatgcgggaggaagcggcaccggaaggagccgtggaccgcatcgaagagagaatgccggaatgagtagcgagaggaaggtgggaatccttccggccgaatatccaaggtttccagagtaaagctgatctgctctgggtaagtcggggcctaaggcgagggcgggagccgtagccgatggacaacaggttgagattcctgtaccgcgatatgacagaactgtggggacacgcgtggaaagcataagccgggaatggaaagaccggcgcaagcggggtaggggctgcataggcaaatccgtgcagcgtaacccgaagccgtgacgcgtaccgaactgcaagtagggaagtatgcgagccatgcgtcaagaaaagccgctatcgctcatatcgcgcccgtaccgcaaaccgacacaggtagatgaggagagaatcctaaggccgacgggagaagcattgtcaaggaactcggcaaaatgactccgtaacttcgggagaaggagtgccatagagatatggccgcagagaattggcccaagcaactgtttagcaaaaacacaggtctatgcgaagccgcaaggcgaggtatatgggctgacgcctgcccggtgctggaaggttaaggggagaggttagagcgatcgaagccttgaacttaagccccagtaaacggcggccgtaactataacggtcctaaggtagcgaaattccttgtcgggtaagttccgacccgcacgaaaggcgtaatgatttgggcactgtctcgacaatgcacccggtgaaattgaagtaccagtgaagatgctggttacccgcgccaggacggaaagaccccatggagctttactccagcttgatactgggatccggtattgcatgtacaggataggtgggaggctaggaagcgatgacgccagtcgtcgcggagccgctgttgggataccacccttgcagtgctgggtttctaaccagcagccgtgaaccggctgggggacaatgtcaggcggggagtttgactggggcggtcgcctccgaaagggtatcggaggcgctcaaaggtcctctcagaatggtcggaaaccattcgcagagcgcaaaggcagaagagggcttgactgcgacaccgacgggtggagcaggtacgaaagtaggacttagtgatccggtggtataaagtgggattgccatcgctcaacggataaaagctaccctggggataacaggcttatcactcccaagagttcacatcgacggagtggtttggcacctcgatgtcggctcatcgcatcctggggctgaagtaggtcccaagggttgggctgttcgcccattaaagcggtacgcgagctgggttcagaacgtcgtgagacagttcggtccctatccggcgcgggcgtaggatatttgagaggagctgtccttagtacgagaggaccgggatggactggccgctggtggatctgttgcgcctccaggcgcatggcagagtagccaagccgggacgggataaacgctgaaggcatctaagcgtgaagcccccctcgagatgagatatccctggcgttaagccagtaagaccccttgaagacgacgaggtagataggatagaggtggaagtgcagcaatgcatggagctgactattactaatcggtcgagggcatgaccagagaggctggaaggcagaaaaagactcggagttggagtttcggatggaagtatttcccgtatgcggttttgaaggtatatatagggcaccaggaggtcatactaaagtgtggaggcgggtgcttttcttcagttacagatagcatgatcctcgatagctcagtggtagagcattcggctgttaaccgaagggtcgttggttcgagcccaactcggggagttatgaaaaatgaaaacatttcatagacgaaggtttatggaatgtttttatttatttaaaagtcctggacgattgtccgggatttttgactatcataatgaaaggagataaaacaagaataaacagaagaaataagggaaaccaaatggtagcattctggtaatggcagtattcctgcctgctataattaactcagttttagaaaaaggggatagaagcatggcaagaccagcatttacagaagcacagattatacagaagacgttggagaatgtccgtagtttttacaatcgcaagcgggagatagcagcactgccaatggccgatgattttgtctggattggggcgtatgattcccagtggagcgaaggccaggaccagtttattgaacttgctggtaaggagaacgaagagtttccgttccttttgtcagatgaagaatatcatctgctatttcatgaaaggaatgtatgggttgtatatgggcactataaggtcactgccacaatggagaatgggactgtatttcatgcgcatgtccggggaacctatgtgtggcgtatggtaaatggcgaattaaaattggcccatgtccacgaatctcatggagatatgccaatgagccagatgacttctgaagcaggacagtgtctggctgatgtggattttctggaatatatgaagcatatggatatgcggaaggcgaatcaagaaaagattgtatttcgggataaggagaagaattaccattatctatttccttccgatattctttatctgaaggcagcggcgcagtattctatcgtgcacacgaagacggatagttttaagacttgggggctactggctgattttgagaaaaaggtgccggagacattcagacgtattcataagagttaccttgtgaatacgatgtatatcgacagcgtcagacgctatcgggcgtccctgacggatggccaggaactgcctattgggaaagagcgctatatggaattgaagaagcatcttcagaatggaatataaagcagaggatccatgtgtcaaaggaattagtgctacagataacatggatttatttaagaaagcggctacttatttggattttcaataaatgccataatataacaaaaaaagcaataagacacataagccgggaaatgatagacttaaaccatacgggattaaaccaaaaagaggtgatggcttatgaattatatcggcattgacatcggctctactgcttccaaggtcgtagttcgggggagcaaggaggcgtattttgtgctgcccacaggctggagcagcaaggagacggcccagactattcggggcaggttaagagagatggaaattaatgtggaggatgaggcaaccaaggtagttgccacgggatatggcagaatcgtagtagactatgcggaccggacaatcacggagattacctgtcatgggcggggcggccgggaactggcaggcgaaaactgtatgatcattgatgtgggaggacaggatacaaaggtgatctctctaagggatggcatggtatatgacttcttgatgaatgataaatgttccgcgggaactggaaagttcctggagatcatggcgaaccggctgggggttacactggaggaactatttgacatggctgggcagggaacggcaatcccgattagttctctgtgtacggtatttgcggagacggagattatcagctacattggagaaggccgtgaacgcagagacattgccgccggagtagtagaatcggtggcggagaaagtagcgcagcttgcaaagcgccaatccctacaggataagatcatccttaccggaggattgagcaacagcccgtattttgcgggacgcctgtcggagaaacttgggaagacggtggagacaagggaaatgggaaaatatgcgggggctctgggcgcctcgtatcttgcagaagaaaaaggttaacaggaggaagagaagatggaacttattaaggaattgccagaggtatttgaagagtttgcagaacagagacaaaaatcgtttctgggcattaagaaactgaaggaacagggagtgccgatcgtaggagtatactgtacatatttccctcaagagatcgcggttgctatgggcgcggcagtggtgggattatgctcgacatctgatgagacgatcccggtggcggaagaagaccttccgaagaacttatgccctttgattaaatccagttacggatttgccaagactgataaatgtccgttcttttatttttccgatgtagtggttggagagacaacctgcgatggaaagaaaaagatgtacgagtatatgtctgaattcaagccggtttatcttatggaacttccaaaccgtcagacggaggaaggcctgattctgtggaaaaaggagattatccggtttaaagaatatttggaagaaaaatttgaaatagagattacggaagagaagatacgagaggctgcacataccatgaatgagatcagaaagtccatgaagcggctgtctgctcttatggcaaaagacccggctccggccaccggactagatatgttccatgtcatgtatggaagcggctttaaatttgacaagacggcaatcccagcggaggtggatacgcttacaaaacagttggaggatgaatatgcacagggcaagcatcttgacaagcgtccccgtatccttgtgaccggctgtccgatcggaggcgcgacggagaaggtcatcaaggccatcgaggacaacggcggcgtggtcgttacttttgagaactgcgtaggcgcgaagaaccacgaccagctggtggacgaagacaatccagatatctatgacgcccttgcgcgcagatacctggatattggctgctcagtcatgacgccaaatccgaacaggcttgacttaatgggaagattgatcgacgagttccacgtggacggcgtggtcgaggtgatcttgcaggcctgccatacatacaatattgagaccaagggcatccgtaagttcgtaaatgagaagggcaagccgtacatcagcgtggagacagactattccatggcggattgcggacagttgaataccagaatggcggcatttgtagagatgctgtaaaaatccattcgggcaatcataagatattgtaccatccggccaatcgataaaagaagtatcgattggccggtttttctgtccgggctgtgaaagttcgccgacgaatccaatgttcagtgtgtatacgtttcgctctaagtgcgaggaagaggcagagtgcattcttgaagacagggcgaccaggatatttttaaatacccgtggagagaatgacagcgagaggatcaaaagaatccatcaacgggtatgcgaggtaaggcttagcgaggaagccggggtgaagcatatgcaggcatgggaagaaaaatattatgagaaagagaatctggaagagccgtcatagagaaaatctttagaaatcgtcacagttgttcagtaacgagagcggaagggcagcaggctgatccggtttgccaaaaccagattttatggaaaggtgatcctcaaggcatgcaccaataggtcttcagaactgatgacctatgtatccatgtctttgtggctggcggtggtggtggcggaagtcatggcgcttatcatatcagccatcttctgtgttgcgcagagaaagaaatatggatatttgtaacgcgctggtgccggagcaatatatgccccggcaccatttaaccggcaggatctgtgtaacagtcgttgtcagatctgcccatagatcttctccagaatatccagcatctgctctctatcaaaggcagcggtatccaggcagagatcataattctccatgtcttcccagtactgatctgtatagtagttatagtagtaacttctatctttgtcaaccttgcggatcagttgttccgcctttttctcatccagagaataacgctccataaccgtctggatacgttcatcatatggcgcgtataagaagatgtggcggcttgtcttgcagtctcttaagacatagtcggcgcagcgccccacaatgatacagtcttcccgctcagcaaggcgaagaattacgtccgactgggtctcaaacagtttctcatcaatgtgttcgtaacggtatctgcggtccaggccggaatccagatcgacttgataagaccaaggcttttctcgcttttcatccacgcgttttaattgttcataaggaatatcaatttgttcggaggccagtttgatgagttccttgtcgtaacagttgattccaagccttgctgccagcgcgtttccaatgatacgtccgtcacttccgaattgccgtccgatggtaataacacgtttgctcatatatataccccgctttctgtaggaggatcccttaaaaagagaaggctcctttgttaatttcagtgtaacatgcccggaaaaatgtgtaaagaaagaagtttcccgtcctttcggcaggaccccctaccggggttgtaaccccaaaaacgcaatgatatactgggtaaaaggctgtttttaaaggaggagaatcatgaggaacaggttggtcagttttttgggaatggtactgcttttgacagggctacttacgggctgcgataaaagcagcgctgaagctggcgcagcggcagatggggcaaaaaagcgggcagcggatgaggtcatagtgacgatgccgaccacgtccgagccagaatcgggctttgatccggcctacggctggggggcaggggagcacgttcatgaaccactgatccagagcacgctcactacaacgacaaaggatctgaagattgaaaaggatctggccacagactatcaggccagtccggatggccttacatggacggtgaccatccgtgacgacgtggcattcacggacggggagcctttgacggcggaggatgtggcatttacctacaatcattgcaaagagaagagcacggtcaatgattttaccatgcttgataaggcagtggcagttgatgataagaccgttgaatttcatatgacaagagcattttctatctggccttataccatggctgtagtgggaatcatcccggaacatgcctatgatgagaactatgggcagaatccggtggggtccggccgctatattatgaagcagtgggataaagggcagcaggtgatctttgaagccaatccggactattatggggaaaaaccgaagattaagaaggtgacggttctttttatggaggaagacgcggcgctggcggcagctatggcaggaaaggtggatgtggcgcatacggcggcatcctacagcgatcagcagatagaaggatacagccttcttgccgtgcagacggtggataaccggggatttaacctgccttctatcgagccgcaggagaaggatggcatcacctatggcaatgcatttacggcggatgtgaatgtgaggcgtgccatcaacattgggattgacagggaagaaatgattgaaaacgtactgaacggatatggaacccaggcatatagcgtatgtgacaagatgccctggtataacagccagtgcgaggtagactatgaccaggaagaagccagaaggcttcttacagaggcaggatgggttgagggcaaggacggcatccgggaaaaggacggaaaaagggcagtctttaccttgatgttcagtactggggacagcgtccgccaggcactagcggaagatgcggccaatcagttgaaggaaatcgggattgaggtcaagacggaaggcgtaggctgggatgtggcttatgacagggcccagtcggagccgcttatgtggggatggggcgcccatacgccgatggaactttataatatttatcattcccttgaaggcaggggaatcgggcaggcagagtattcgccatattcgaatgggcaggtagaccagtatatggatcaggcgctgtctacaggctctttggaagattcttacgaactatggaagaaggcccagtgggatggaaccaccggcattattcaggaaggagatattccctggatctggctgtgcaacatcgaccacctgtattttgtaagagatggccttagggttgcggagcagaagatacatcctcatgggcatggctggtctatcgtcaacaatgtggaccagtggtcctgggagacggcagaataatcagaagggaggaagtggaatgaaggggcgctacggaatcaagatcagtcaaaatatcatacgggcgcttcttctgattattctgaccagtatggtggcatttgcgctgatgaaggcctccccggtagatcccctgcaggcgaacgtagggcaggccgcgctggggagcatgagtcaggagcagatcgggaaactgcgtgaatactggggagtgggaacttcccctgtcaggcagtatctgtcctgggcagccgatttcgcgacaggggatatgggaacttcccttctgtaccggcagccggtcaagaacgtgattgcagtcaaactttccaattctctttttctcatggtgatcgcctggatcatctccggagttctgggatttgcgctgggagcgattgcagggatgaacgaagggcgctggatagataagggaatcaagggctactgtctgctgatttcaagtacgcccgccttctggctggcacttcttctgctggtggtattcggagtatggctgcgggtattgcccattggaatgagcgtgcccatcggagtggaggccagcggagttacattcacggatcgggtatatcatgcgattctcccggcagttaccttaagcattacaggcgtatcaaatatcgcgcttcatacccgggagaagatgattgatattatggatagcgacttcatcctgtttgcgttagccagaggcgagagtggctttaaactgttctggcgtcatgggctgcgcaatgtccttctccctgcgcttacgctgcattttgcgtccatcagcgagattatcggaggctctgttctggtagagcaggtattctcctatcctgggattggacaggcggccgtggcggcagggcttggcagcgatatgcctcttttgatggcaatcaccattgtcaccgcgctgttcgtctttggcggaaatatgaccgccaatatcctctatgggctggtagaccctaggatcagaagaggaggggcgtcttaatgaagagcatgaaccgtagaaagaaagtattggctggtgtcatgctggcagcaggctttcttcttgtcgtgtgcatcggaggcgctgcctgctcggaatgggcggtggcgacggactttacgcagaagaatctaccgccgggagcgggacacctctttggtacagactggatgggaagagatatgctggcgcggacgttgaaaggactgtctttgagcattctgctgggcatcctggcagcaggcgccagcgcgtgcattgccctgattctggggattgcgtccgcgacgcttgggaaaacggtggataagatcattacgtttatgattgatctgattcttggaatcccccatatcctgctgctgcttttgatctccgtggcgctggggaaaggactcaggggcgtagccgtaggaatcgcgctgacgcactggccatctcttgcccggctgatccgggcggaggtattgcaattaagagaaagtccttacatacagattgcacagaaattaggaaagagcagatggtacattgccagaaagcacatgctgccccacctgcttcctcaatttatggtgggactggtgcttttattcccccatgcgatcctgcatgagtccagtataaccttcctgggattcggcctgtcttcggaacagcctgcgataggcattgtattgtcagaatccatgaagtatctggtgacgggaaaatggtggcttgccctgtatccgggactcttcctggtgctgaccgtaatcatgttttatgtggcgggagaagggcttcgcaagcttgcagatccgggaagtgtgcatggatagggagaagatgagatggaattgctgaatattaaggatttgaatatatcgtttacgcagtatgagaaaggaatgcgccagattcagctgaatgtgatccgcagcctggatgtaaccgtaaattccggggagatggtagcggtggtaggtgccagcggttcggggaaaagtctgctggctcacgcgatcctgggtcttttaccttataatgcctgtctgaaaggatgcatgtcttatcgcggcagcgaattgacgcaggaaagaattgaaaaactgaggggaaatgagattgttatggttcctcagagcattgcgtatctggatccgctgatgaaaataggaccccagatccgtaaggggagaaatgattcggcgacgaaaaagaagttaaaagacatcttctccaggtatgaactaaaggaggaggtacagaacctgtatccctttgaactatccgggggaatgaaccgaaggatactaatctctaccgcgctgatcgaagagcccggactggtgatcgccgatgagcccactccgggattggacttaaaagtcgcaaagcgggcgatgggacattttcgggaactggcagatatgggggcagggattctggtgatcacccatgatctggaactggcgcttgaggtggcggacaggattgtcgtattctacgcaggatgtacggttgaagaggccaactcctgcgactttgaacgggaagagacgcttcgccatccttataccaaggccctgtggagagccatgccggcgcatggattccaggccatcgaaggaacacagccttacgccaaggatatgcacgagggctgcccgttttcccccagatgccagtcctgtacggaagcatgcatgcaggaagtgaagcttcgcagcctgcgtggcgggcgcgtgcgatgcctgcatgcgagatagggcgaagcgcgggctaaggcagaggaagcaaactagacaggagaagacagagaatgagattagaggcgagagaggtaacctaccgatacggaaaggatagcccgatgattctggaagacttcaactttcagatggaggatgcggaacgggtggggatgatagcccccagcggatatgggaagaccaccatatgcaaactgctttccggatatctgaagccggagagggggcagattattctggatggaaagccgttgcattcggaagatggatattgtccggtccagatgatctggcagcagccggaactggccgtcaatcccagaatgcgcatgcgggatgtgatactggaaggagaccaggtagaagaaagagtctggaaggaactggggatcgaagaagactggatgaaccggtttcccgcagaattgtccggcggagaattacagagattctgtattgcaagggcattgggaaaaggaacgagattcctgttggcggatgagatcagcgccatgctggacttgattacccagagccagatatgggacttcctgatcaaggagacagagcgaaggcagatcgggctggccgtagtcagccataataagcctttgctgcatcatatctgtaccaggattgcaaatttgaacccgactgcatataataaataagtaaggacagaattttgcccttgcttatttgcttttagacatgaaaaaaggcgcagcggtaacgaacgcagtatactatcatgtactggtttttgagatacacagcaccatgcctgtagaaggaacttgctatatcataagcagcaggtatggaattgattttgccaaactgcgtctgtctgtggatgcagcctgcattataatcttgctggccctgacatttgcctttggcctgaccttgaagattcgcgaggggactatagcggggatgctggtgctgggaccactgatgggatggtgcatgaaatgggagaagaaagtactggaacatattgacttatagcgtcctccgctttcctattccttgctggtatgttagaatattggcaggacatatcgggaaggagagacaaggtggaaaggcacgttatgaagaggaagagactacatataacgaaccgaataaaaggaatcgccggctgcatattattggcagccggttttgcactgctttttatctccagattatcccaggagtttgcccactggtacagcacgaaggtgtatccggtctgggtgggaactacgggcaggctgatgaacctttttcctttttccgtgtcggaagtttttctgtatatcatgattgtcattattctactgtcagcaggagtgctgattataaaagaagtgagaagaaaggcagggaagaaggaggcgtgttcctggggaatgggcctgttcctgcttgcggcctttctgttctttctctatgtattaaactgcggggtcaactaccaccgggaatccttctcggagagttcgggcctccaagttgaaaactatacggcaggcgacttaaaagaagtctgccagtggcttaccctgaaggtaaatgagacaagcagcgaggtggagcgcgatcaagacggagtgatggtactggatatcccgatggagaaatacgcggcagaggcaatgaggggcctgggggaggactatccggaactggccggatactatccccggcccaagggattgctggtgccttggatactctctatccagaatctgacaggggtctactcgccgtttaccgtagaagcgaattataacagcgggatgacagattacaatattccctttaccgcctgccacgaactttctcatctgagaggattcatgcaggaagaagaagccaatttcatcgcttatctggcctgtagcagatcagataacgtccagttcagatacagcgggaatctgctggggtggatctactgtatgagcgtgctgcataccgtggattatgatgcgtgggaagaagtgcgccagacgctggcgccggaagtggagccggatcttgctgcaaatcgggagtactgggccagatatgacggggcagtggcagaagtttccaacaaggtgaatgatacctatctgaaggcaaacggccaggatgacggggtgaaaagttacgaccgcatggtcgatctgatcgtcgcttattatttgaaagttatcatacgccgttaagaatttgccacaatgcagagcattggattgatggttggaggcgttgctacggatgttagattttccctaaaacagataacccgcaaaagcgggatagggatgatgagacgaaggaatggagacgtatcatgccaatcagagattcggcggcgcgggagtggaagaaaaaggaaaagcaggatttaagttacagattggaggcgtaatccatgggtaatgaggagatgatatgttactgttccaatgtaacaagaggtcagatcatagttgctaggaaaatgaaaagaattgagcccgcgtggaacaagatgtttaccgttaattatggatataattaagaaatatgtaagataatatgaagaaggggctatcgggaaatagatagttccaaataggggcagatgtgactcataccaggtcacatctgcccctgaaatttttccataaaagagaaaaagatggctaacgacaaccatctcttctccgttacatgttataatgtaactatgctaaacaataagtattataacgaattttttgaattagggcaacagaaaattaacttcagtttcttcgaattgtgtttacctgacgacgatccagtctataccctgaaaaaagtgatggaggaattagatttttctggcttgttggccaattgttcagataagggaagaaccgggtataacccaattatgatgtatgccgtagttacttacgcaaacatgcgtgggattagagctgttgaccgtattgtggaattatgcgaaagagaccttgcatttatctggcttaccaaaggtcagaaaccaaaaagggatgctttttatgagttcaagaataaaagactgactgcagatgtattggatgagttgaattaccagtttctccgccgcctgcaaaaagaaggactgatcacattgaaatccctttttattgatggaacaaaaatagaggccaatgcaaaccgctatacatttgtgtggagagggacgatcaattatcatctcgcaggcttactcgatatgattgattcactgtatcagaagtataatgcatggatagatgaaaatgagtatggcataaaatatgacattccccatgcacatatgtttgtgatcgaaggaatggataaggtaagagatgtcattgaaaagaaccggaagcgaaaactgacaaaacataaaaagttgtccaataatacgatcatcgagattgacaactgttccccattggagattttgaaacttcagaaaaatctgactcagatcgcagagaaggaacagattgcgtttgtttacggaaaagggaagaggaaatcggagctccagcagctttatgaggaattagaaacctgcggcaaacgccttatgggatacaaagaatgttttgagatcatgggaaaggacaggaacagctattccaaaacagatttagaagccacctttatgagaatgaaagaagatcacatgctgaacggacagttaaaagccgcatataatgttcagatcgcagtagagaattatttcattgtccatgcttatgtaagcaatgaccggacagactataacacactgattccggttttagaaaagcataaaaatgcatttggggagattttggaagaagtaaccgcagatagcggttattgtagcgagaaaaatcttctgtatttaaagaaaaataagatatccagttacatcaagctgcaggatcatgaaaaacggaaaacacgcgcttacagagaagatattggaaaatattacaacatgaaaacacagatatttgaggatgaacggtattatgtttgtcatgacggaagaggattgcatcatatccgcacagagaccaaaaaacagccgggttatacccagacttttgaggtatacggatgtgcagactgtagtggttgtgaacacaaagcgaaatgcttatataaatataacgcagaaaaagatgctgagaaaaacaaagttatgaagatcaatgaacaatgggaaacattgaaagaggaatcccatgcaaacatccaaagtgagaaagggagtctaaatcgtcagatccgttccatccagacagaaggacattttggagatatcaaggaaaatgatagtttccgaagattcaactaccgaacgtcagagaaggtgtataaagaattcatgctgtatgccattggtcggaacatgaataaatatcatcgttttcttcatgaagagattaaaaaattcgaaggaaaaaccgaggaaaagacggcttaaaaaatgtgcatgttcaaaaatgcagttatgggtgttttgcgccctaaaatatatacagaaaaagaacaataagaatctcccacagaatatcaagtatgaaaaacactgatttttatgggagattcttattttaggatttagagtttaaaaatcggtattaaccgacatccccttctttctaccatgctgccgtgacaacttcattaaaacgacttaaaagtacttaacagacttaaagttccgttaacaaatttttaaccaaaacggggtgacagtgaggagcatctgcatgataacatataaccagcaaagccctaagacgggattagatgtgatcagaagatgaaaggaattgagaaggaattgagagagatgtttaagttagggaagagagtatgtgcggggataatggcagcagttacccttggcgtgacattattaccgggagtggagtcttacgcagcagcagaagatctaacagaaaatctgaagatatgtgttatatccgacacacattactatccgcttaattatgtcagtgattgtgaagactataagacatacgtaggcggagatcctaagatgctggcagaatccggagctattctggattctgcacttgatatgattaagacagatcagccggatctggttcttgtatccggagatcttaccaaagacggagaaaaactgggacaccagaacatggcgaagaaattgcagacgatcgaagataagacggatgcagaagtatttgttatcaatggaaatcatgacatctataattatcaggattcctgcacatttgaaaatggtaagaaagaacaggcaacgaccacgactccggcagaattcaaagagatctatggtcagtttggatataacggagaatatgatgcacagtattacacacctccgacaggaaaacaggcaggcggtctgtcttattccgtaacagtcggggattatgtaatcatcggaatcgattccggcagatatagtccggatgccgataccggaatggataccaacgaacatattactgcaggacgaatcgacacatctcttcttccatgggttgaacaacaggtgaaagatgcgaatgcaaagggaaagacagttatcggactgatgcatcacggattggtaccacacttttctaaggaagcagaactgttaagcgagtatgtagtagacgattggcaggagatggcatctacactggcagatgcaggaatgcgttacatatttaccggacatatgcatgcgaatgatatcgcagagtacacatctgtaaaaggcaataagatctatgaccttgagacgggttccctggcagcctatggttctccggtacgtacggtgacgattcagagagatcagacgatgactgaccagtcaacacttcagttagatgagacgtttcatgtgaaaagcaccagtgtgaagtcgatcaactataacggagcgaccattgatgatctgcaggcatataccatgaacaagttatatccggagacgctgtttaacaatatggctggcggaatgttaaagccgatgattcaggatgttgcagatacgggaatccggaactatcttgcggaggaaatgccggagttagatatagatactattgtactggatactgtgcgagagatgttggcagggggaatgaatctggaactgggttcaggtatcggtcgtgttgcagtcagctatcgaaacggaggaattgagctgaaacctacgggaacagcaggactcattggaacaaccacgatcagtgatgcacagattatccgggtggtagacgatcttctggcaaaggtggagaaccagtacctgaagaatccggattatctgttaggaaaagtaaatgagattgttaccaaggtttcccaattcggtgtgggttctttggatggtcaggaaaagacattatatgactttatcgtattgcttctgacaagccattatgctggtggtgagaatccaccggcatgggtgaccgaacaggcactcccatatctcagaagcggggcagtcattaaagacctgatggatatgctggttggagacgtcgtagtgatcgtaaatgatatagcagccaatctgaatattgataccggaattgcctttagtggcctgtggaagactgcaattgattctcagacgaataatggtaaccttgctactatactgaaacaattcaatctgaatgtagaagagttgataaacggattaatatccgaatacatgagtgacagtttcctgacgggaatgggtggtctgttggatgattatgcttcgtctttcctatatgatacagaaagcccggatgacattctgaacgatgaaaatggacggacgatcacctggtctacatcgacaccggtgactccgcaggaaccatctgtggcaaacggactggcaccgacgcagattgccatgacccagggagaatcggcagactcgaggtacctgcgctggtacacaggggctggagtgtcagggactgctgtggcacagatctcagagagtggagattttgcggatgcagctacatttacggcagagactcaggaagttgtgaagccgaagacattgttgaatctgggactgatggcaacttataccacacagaaagcacgcaaatacacagcgaagattacaggacttgagaccggtaagacttactattacagggttggtataagcgagacaggcaatttcagcacaccggtggcatttacagtaaagaatgaagaaacatcagggttcacatttattaatgtgaatgattcacagggaatgattgcatcggattatgagacatatctgaatacgctggcagaagctaagagtcagtttgctggagcagcatttgttcttcatgcaggagattttgtagatgatggaagcaatgaggattactggacatgggcgctggaaggagtatctgaggctgtatcttatatcccttctgcaggaaatcatgaagcgaagtccagtgtagaaggaattacggacccgaacgctattatctcacattttcaggtacaaaatcaagacattccgaatcaggatacaagtaccggaatctattattcttatgagtatgaaaatgcaacatttatcgtgctgaatacgaatgatgtaacagatgacggatacctgtcggatgcacagtatgactgggcttatgaaaaggcagagaatgcacagacggactggaagatcatcctgatgcataagtcaccatattccaatggcccgcatgccaaagatgccgatgtggtagcaatccgtaagcagttaaataacctggcggcggattgtgatgtggatctggttatgtccggtcatgatcatgtatataaccgtactccgtatcttgcgcagggcaagacacagcaggtgactaccaggacaacctcttatcagggaaataattatactactgccgtgaatccgtccggaacggtgttcgtgatcgccgggacggcaggagtgaagaattatgttcagactccagtatctaccgtaccgagtgagaagacatttcagcagacttgccctgtgtatgcaggtgttacgattgatgatgggaaactatattacagagcttaccaggtgaaagatggtgtgtctcaactggtagattcctttgccattgataaatcaaaagagacagaggttccggagtggaagaaagttgaggatatgatagctgagctcccggatacccctacattggatgatgcatctgagatccaggcggcaagagcggcgtacaatgccctgagcgatgctgataaggcacaggtggctaatgtgaaacgtctcgagcaggcagagaagatgctgcgggcattacagagtattaatggaaaacagaccaggtatgtaaatagcaagtcagaatttctgaatgcactgaaggatacgaatgtgggaacgatcataacggatggtgctacgattgagtttgaagacgaatactggtggggcggtgcgtatgataatgtttgggaaattaccagagacctgcgtattatgggaagctccaagttgacgtatgttactttccgggtaaagaacggagccacactgatactggatggagatatcgcgatcgatgatacgagagcacaggggtctggatatgcgtccttgaatccggtggaagtatatgggaactctacgctgatcacaagtggacatgtagcgttgcgtaccgaatatggaacaggcggagaaaacgaaggtgtctgcgtgaagatgatggagaatggaagcaaggcaatccttggaagtgacggaagttactatggagcggaagcggccgtattgtctataggatcgggtacagaagttatcatcaatgccggtacttacgcaaggaagaataacaatcatcgtgcggtggactcccggggaacgattgaagtgaatggcggagagatcgcgaatctctggagcaatggtgctctatatatcaatggcggaaccttcgataatggaagtaatctgaatccacagattccggtagatatagaggggactgcatatatgaccggtggaaggatcacaccatataatgggaatggtgtgaagcttagaagtaccggaaaactgcatatcctgacaggcagtatcggacaggcatccatcggaaatgtacagccatatgtaggcgcggtgacaactcagaattacaaagatattgaggtgggctaccacaatattaacggaagcggaaacagcgacggcatctacgaggcatccgcagcggccggtacggtggaaagtctggcgaatgcaaacggaacgaagcttgccggaagcgccgtcgcagatggaaggatgacgggtacactgggagaaggcgaccatcatgtatatggaaaatattatcttgccggcggaggtaagacagcggcaaccggattcagtgtagacagtggcggagaagcgattgtgtatggtccgtcaagatttatcgagaactatcgggtgacggacgcagtgattgagggagaagcgaccagactggtacagtatcaggacggcgccgtaattaggttaaacggttatacccttcctgccaatgcattcgataatgcagtgagctggacgtcggataatgcacaggtggcaactgtagaccgcggaaaagtcacattgaagaagaccggtacggccaatattaccatgacgtcccagtccaatgccagcatctctgatcaggtgaagataatggcagtagatccggtgatcaatggagaggagcttatcgaagatgacgcaccgcaaacctataccgtggatttgcaagcgacaggtatcgatgagacggatcggaacagaatcagttacaaatggtccgtggatgacttaaaggttgcgacgatagacgaaacaacaggagaacttacaaaagtcggacagggaacggtgcatgtgacagcacagcttctgttagacggtgtggctacggatatcagagtcagcaaggaagtgcaggttcgggatgttatatcagtggaaatcacatggggcgctatggaatatacctatgatgatggacagtggaataaggatacgcatcagtatgatggaagaggatggactacagacacaagtgaaggagatcagattcaggtaaagaatacaggaaaagaagctgtggcagcaagatttgcatatcttgcggaagaaggttatacatctatagatggacgttttgtaaaagataatagcccgattacagcagacacacttcagccacaagaaaagatgaaggtacagcttcagcttaataataagccggataagaagatggataaaacgacagtaggaactgtcacaatcacaatcaatcgggagagtacgaattaatgaaaagagaagaaacagatagaaatgagcagatagggaaaaaaaagagcagcggaaaacgtcagaaaaacaaaatttgtattatcgtccttctgattatattgttactgggaataggaattcttgtgtttctgtgcgtaaaaggtcacaaatcggatgattttgcaccgaaacttgattcaactgcagaacagatggaagataccggggagaagatggatgcgccggaaggcggcggtgcggtaagcctgacatattctaccgcagttacaatctctatgaaagaccggacagcccagattctgttcgagaatccatcgaagtctaccaaagacacggtactacagctgacggttaaaggacagaaagaaggacaggagtctgtgatcgcacagtcaaaactcatacctgcagggtataagctgtcacagatggaactggatgatgatgtggaactgaaggtgggaaaatatgaaggtaacttgaatgtattgtattatgacagcgagagcaggaaaaaagaagtggtagacacgaagattccagtgacgctgacagtgaataacggaaattaagttatgcattccgttttcaatatagaatccatcaaaaaatgaagacaatgagatcaaatgaaaaggagagaaaaacatgaaaatcaagaaattaacagcagtagcaatgacaggaatgatgacattaggaatgggaacaagcgtatgtgcagcatcaccaataacacaaattggcggtactgatgcaaaggatgtaaaggcaacatatgctgcggatcagacggcagggactgtgtacagtgtagatatcgcatggggaggcatgcagtacacttatacaattgattcagaaggaacctggaatccttcaacacataagtttgacggagcatcagaagcaggaagttggtcttgttctgatggcgcagacaaagtaaaggtaacaaaccactccaatgcagcggtaaaagcagcatttacttatgaagcggaaaatgactacaagacaattaacggatcatttgacaagccagatgtaactcttccaactgcagaaggcacagaggttttaaatgcacctacagatactgcaacgctgtcgcttagcggagctctgaaaaagaatgtgccaacagctacaacaatcggtactgcaaccgtcacattaaacgtagcacagtagggaaatcaatcagatgaagaggaagacgattacaacgatatgcatgatgcttctgttattatgcttctgtacggcaaatgtatctgccaaggaggacagtaaagcggtagcagggaagaaagtctttactctaggcgctcatacatacattagtgagatcgtagatggacatgcagtggttgccgccagtgatggtgctcaattcgagctgacaggaaaagggatggacgggttatacctgtgtatcatcgaactcctggaaggtgatgacgcctatgagtggctaggcaacgagttgcaaggtgacggggaaatgcaaggagcttatgcggtactccttatgaatggcgccggggaatatgtaaccgcagataaggactttaccgtaacgattcaggtgaaagcgtcaggagaagatctgaaggtatggcatgtggagccaaatgggaataagacagcacttcagccggtagaaggagatggcttaagtgtcatcggtacaaagacagattactatgcggtagtgtgtggagagtcattgaatgaaagtacgctgggggaaaatgtaccgggtggtaatacatcaggaagtcatgtaccgggaagcagtgtgtcgggaggggcttttggggcgatcaagacgggagacaatgccggagtatttctctggggacttatggtgatcgtgggagttgcaggatgcgtggcaggattaaaaaacaaaaagcgtgacatgcatatgtgaaatagcggtcataaataaaagacatgtgcgataaaattatctgagggttaggagataaaacctggctcttagatttttttattatacgaggaaagttccttgttcttaaaaaacaatacggagtgtaggaatatatgtgaagtagtatgtatcctaaatggaaaataaagccaaggataaacaaaattccgtatgctggctggtcttgtacttgatagcggcggcggtaacgccatacttgtcggaaagttattctggcatagacattcagtctatgctagaatataaataaagcattatatttctaatactctagtagcgtctgccgtatcttctatctatagccaacaggcatttattcggaaatttcaatgcttaaaaacccaggaaaacagcagagtggttccgggatggatggggtgcgagcaagtattgagggtatataccgcattgcttcaaatccagagatagacaaggaggaaataatcagtaggataaagaaggaggctgatagtatatgaatgtaggatcaaggctgacggttaaggcgtaccctgtcacagaagtgtgctatggggaggagaaccgagtgacggtggatggccggatgacggtctgtaagaacattgcagaaaagattctggcgcaggagccattgataaaggagattgatatccgtattatcatgccggatgagcaccgacagcataccaacacggtgatggatgtgattcctctggcaaccaaagtgctgggacgggtgggggagggcattacccataccctgacaggcgtatacgtgatccttaccggtgtggatgagagcgggcgtcagatatgtaattttggcgccagcgacggaatactcgaggagaagattgcctgggggcgggcgggaacgccgcttaggagcgacgtgctgatctcctttgacgtggttcttaaggaaggatcctgggcggatcgtccgggtccggaagcagcccatcgcgcctgcgatacatactgccagatattccgggagcagataaagaagtttaatggatacaagtgcgcggaaaagcatgtctttcaggagacgtatgagccggggaaaaaagatgtctatattgtgaaagaagtatccgggcaaggtgccgtatacgatacccggatgttcggacatgagccttgcggattcgaaggcgggaagtctgttattgatatgggctgcatgcctgcgctggtgacgcccaatgaatttagggatggcattatgcgcgcgatggattaggattcgacgataaagtatggaggtgcagttatgggaattggaacaagcatgaaagaaacttccctgcattattacagggatcccttggtagaagccgtatcggaagacccggaagtcaatctgaggggaatcatcattgtgggatcgccggataagaatgaggataaatatctgtcagcggagcgggtcggggtcagcctggaatgcatgagggcggacggagccattttctcctgtaatgggatcggcaataatcatgttgactatgcccatgctattgaagcgacagaagtaagggatgtgccggtggtggctcttagcatgtgtccggcgaaggacttcgtggtgcagaatgatcatctggacggcgtgctgtcctactataaggcgatcgataagatgggacaggacggggatgagacaacggtgcttgccgagaatacggtaaataagctggatgccagaaaggcactggcaatgctgaaattaaaaatgagaaagaaagaacagaggcattgaggcatcctatgttaaccgggatagcagcgcgtttaagaaggatatgtatattgcctggagagataagaaaagcaggcacgtcaagggataagccattacgtgcctgaattatgaatgtgcattcgcgatctatgtgtcaatcttaatattcgccagagcgtttgcaaaagcattattaatcggttcttccttctgcttcttcagataattctggacatcttttttggatactccggcgccttctttttctcttcgcttcttgaaagcggagagtttttctttgtatccgcaggcgcagacaaaggtctcttcttcgccttttttgataatctccatcttcttgtggcagttcgggcagcgggcattgctcagtcgggcgatggtctcccggtatccgcattcccgatcctggcataccaggaggcgcgcattctttccattgaccgccagcatccgcttgccgcatcttggacacttggtgttggtcagattatcatggcggaaggtgccgtccgctgtcttgatctcctggataagttccttggtgtaatcctgtatctcggcaaggaactgggcatctttgtgggcgcctttggcaatgttggaaagttccagttcccacttggccgtaagttccggcttctttaagtcctcgggaactagttccagaagctgctttcctttggaggtgatgagaatctcatttccttttttctcaatcaggaaggagtggaatagtttttctataatatcagcccttgtagccacggttccgagccctccggtctcgccaagcatcttgcgcgcctttgcgtcctgggattccatgtatttgaccggattctccatggcagttagcagggtcgcctcggtaaaccttgcaggtggctttgtctttcccgtcgtcagggcaatctggctgatagataactgctctccttttttaaggagcggcagaggctgttcgcaggactgccaggaggcatcgtcttcttccggagcatccagaaaagaactgtcagccgcgctggaggaatcgtagatggccttccagccaggagacaggatgatctttcctttggcggtaaaggcctgtcctgcggcggaggccttcaaagtggtctgctcatattcgaaggccgggtagaggatgctgataaatctacgtatcaccagatcatagatcttgcgctcgtcgttgctcatgtgctccagctggacaaattcttccgtggggatgatggcatggtggtcgctgactttagcgtcatctacgaatgccttgctggtctttatgggcgcttttaaaagcgagggaatgaacttcttgtagggcccgatattgcatgccttcagccgttctttgatggttgggacgatgtcggagccaatgtagcgggagtctgttctgggataagtcaggactttatgctgctcatagaggcgctgcatgatattcagggtctccttggcagaaaagccaaaacgccggttggcgtcccgctgaagttccgttaagtcgtataaacccggagagaacgttttcctggcggacttctggacatccgttatttgcagggcctgacccttgaggctggattccagatccgtgacgaaagaacgcttaaacgagcgcaggcttccattcttttcattctgccaggaccattttacattgccggcgacgcaggaaagaccatagtattcttcaggcttaaaggaacggatctcttcttcgcgccgggcaatgattgccagggtaggcgtctgtacccgtccgcaggagagctgggcattatacttgcaggtcagcgcccgggtggcgttgatgcccactagccaatctgcctcggcacggctttttgcggcgtaatacagattattgtattggcgcccgtcttttaaacttaagaatccttcccgaatagccttatccgtaacggatgagatccacagccttttgatcggcttatggcagccggatttgtccagaatccagcgggcgaccagttcgccctcccgcccggcatccgtggcaatgataatgtccgatacatccttgcggaagagctgggtcttgacattgtgatactgcttggaggtctgcttgatgaccaccagctcccatctttccgggagcatggggaggtaggacatgttccattctttgaactttttgtcatattcctccgggtcagccaaggttacgagatgcccaagagcccaggtcacgatatatttactgccctcgatggcgcccggcatattcttgtggcagtccagaacccgggcaatatcgcgggccacagaaggcttttcagccagtacgagtgatttcatatatgatagtctcctttgatattcggttgaatgtacctattcaacatagcggatttgatccggtttgtcaacggatagccaatttagaatgtgcaaaactgtgcgatttccttaactgtgaaatcggcgatctgttaaaaatagaaaatggattaagattgatgtatctgcgggtatagcaattttatcaatgaaagtatgcttgacatttaggatggttttgatagaatttttgttgaacatatgtaacttctttcttgtataattttttatcgaaaatatattaaagtttcaaggttctgttagcgggtcagacacagaaaatactatgttctgacctcagcatcatgacattgatataagattattaatgaaaggacgaatttttacatccttttaaatgatatgtatacaaacgaggtatgattatgcaaaatatgaattactattacgatttttcaggacaaaaatataaccatccgctaagtttgagtatgaacagttttgatcgaaaggtattttccagacagacaagtctggagatttctttcgtattaaggggcagctatgaagttgttaccgagcatatctcccatgttttacgtgaacaggaactagtcgtgatctcgccaaatgaaatccatattttaaaaaagattgatcctgatagtgtgatcttaattttgcatatcgattttgaccgtatcccagacactttactcggttcatgccgcaatattttttataccacgatctgtaatcttcaaaataaccgacagcttttgttcttattaaaagaagaactaagaaaattaatcgtagtgcttctacaaggaaatgtaaacgaaggaacagacttatttgaattaaatgaaatcatgatgaagattttgtgcatcacaaagaaagagcagagtcactcttttgagcaattgccagtagcttccatccatcatgacaactatatcaaagcaattcgctatattgatcagcactaccatgaaaacatccatttatccgatatcgccaagacgctttcattcagtaatagttatacttccagactatttaccaagtttaccggccttccatttgtaaaatatctttcttatgtgcgtgtccgggaatctttagaatatctgttagaatgtaaagcatcgattgaagaaatttccggaatatgtggaatgccaaattcaaaagcttacactcagattttcaaagagctttatggaatcacgcctagcacttaccgaaagcgatttcttaaaaatctgcttcctcttccgggaaatgaagctcgtccaatggactttacaaaagaacaaaaagaattaatgaatcatgtatttcaactagataattataaagaatgcctatatcgttcgaaagatgtcgccatagagaaaaaaggcgatactttgttatgcacactggcaaatcatgaggaacatgaattccactatgtacaaaagggggatcgggttttgatcacgattcatcctgtagcaaaataagatttattttctaaaacagggtattatatgtcctgtttttctttttctcatatattcttgttaaataaaagacaaattatgacggacagtatctcattcttgagaggatattttctttcgttcatattaaaataaaagaaaaaaatattaggaggaaagaaatcatgaatcaatatccaaacctgttctccccaatcaagattggagaaactacagtaaaaaatcgtgtgtttatgccacctatttcaacaaacttagccgataatggttatgttacagacgcacttgttgggcattatgcagctcgtgcaaaaggcggcgttggtctgatcgttacagaagttacaacagtagaacctacttatgtataccttccaggagatatgtccattgctgatgacagtttcattccaggatggcaaaaattaactgctgccgttcatgaatatggtacaaaaattttacctcaattatttcatccagcatatatggcattccctattccaggaactccacgtctgatcgcaccttcttttgttggtccttattatgcaaaagaagccccaagaccggttacagtcgaagaattacatacaatcatcagacagtttggagaagctgcattacgagtaaaaaaagctggtgcagatggtgttgagattcacgctgctcatgctcacggattattaggcggatttctttctcctctttataataaacgtacagacgaatacggaggagatatcaatggtcgcttaagattaacattagaagttgtagcagaagttcgtaaaatgtgtggacctgaattcatcattgatgttcgtatctctggagatgaatactctgacggtggattaaacttaaacgatgcaatctacgtttccaaacagttagaaaaaactggtgttgatatgcttcacgtttctggtggtacaacaatcaaacgtggaagttctattccggctcctggaacaaagatgggatctcacagtgcattatctgcggaaatcaagaaacacgtttcaattccagttgcaactgtaggaagaatcacggagccatggcttgctgaagaattaattgcaaacgacaaagctgatatttgcatgatcggtcgtgcaaacttatgtgagccagaattctgtaacaaagcacaggctggtcacacagatgaaatccgtccatgtatcggatgtcttcgttgcttaaatggtattatgttcggaaaccgtattgcttgtactgtaaatccatctttcgaacctgaaaatgaagagacacttacaacagcagagacaaagaaaaatgttcttgtaatcggtggtggtcccgctggtatggaagctgctttcgttgctgcaaaacgtggacaccatgttatacttgctgacaagcaggatgccttgggtggaactgttcgaatcgctgctgttccgatcgcaaaacaggatctgacacagttgatcaaataccaggctcacaaattagagcaagttggtgttgaagttctcttaaatacagaagtaactcttgatatgatcaagacagattacgctgactatgaaatcattttatgcggtggtgctgcaccaatcgttccaggatttatgacagaattcaaagattacatgactgcagatgacgttctttatggaagaaaattcccaggacataagatcgttgtaatcggtggtgggtctgttggttgtgagacagctgattaccttgcacctgtactcaatgaccgattcccgaaaaaccgcgagatcatcctgattgaaatggctcatgagatcatggcaaatgaaagcggcccaggaagaagtcttcttgttcagagaatgatggaaaaaggtatccagatcatctgcgatgcaaaagtagaggaagtaagcaacgacactatcagctactctaaagatggttcaacacatcagatcacagacgctgacacattggttcttgctatggggtaccgttctaacgctacattacaagaacaactgactgaaactggaatttcatactctgttcttggtgattgcaagcagttaggaaatattaaagatgcaatctcacagggatatgaattagctcgcacactataattcgcctcaaaaatataactgatttattaataattattactttacctaattattcaatgtcatttggtgtaacaacgtaataactgatatgcggttctcttcttcagttgttactttgtcatcaaatgacattggatcacaattcagcccatccattccctaatctagtagatttagttcgatatctgtaagtcgaactgccacaaaaatgtcacatattttaatatcgactgtcccttccgatattagaaatagtgttgtgaactcctacaatgggagactggtataaattatataccagtatatatggtgccattttgactttataggaaattccgattttagaacaacgaaaaaagagcaagagtttaccgaacgtatgttagataaactcttgcttaagcataacgataagatgatatagtttagaagatataaaaaccttcagtaccagcatcgtcatcaaataagtcatcttcatttaagaaataatccatatcgagaaggtcatcccttccgatggattagccatatattgtttgcgtagtttctctgtgtctgggttcatgtgcgtggcctcctctgaaaagagcataccaagagttctaaaaacagcatggctgcaccgcattcgcactttagtgggtcatagccaaaagcagaaagaattgcagtacgccaccggttaaagcttctgtaaacatggtgtttttcacaggagatggtggataagacgctgtataaatttcataacgggaatggtttcttctacgtatttgtcgattctggaggaggcaatcacagggcggccaagatactgaccgatgtatccagcttaaaggacatggaagtagtacgccgcatggcgtagagattcccgcaggtagggcagaagcgactgtggaagcgaaaggaaacgaattaaaaccttccgtagcgagggcagctatcgaagtgtcgaagacacttttttaaagattctattagagggaataaaaaaagagttgcaaaatccagcgaattatgataacatatatctcggtcacgcttaaggataagcgagatatggctccgtggtcaagcggttaagacatcgccctttcacggcggtaacacgggttcgattcccgtcggagtcatttgcgcgaaagcgctttatatatagaatggcgccatagccaagcggtaaggcaaaggtctgcaacacctctatcaccagttcgattctggttggcgccttttaaaaagcctcgaaacgttaagtttcggaggcttttttgatatgctatgatacgctcgtatggaccagcgagaatataggggcttacggagaggattcaaaagacatcagcgtctgcggcgatagttccggcgattatatctattgtcaggcgtgggcatttatataatggatgcccgcgtttttctataaatttttgatggtgggagataggctggcattttctgtgcttgtacggtataatacaatgcaagtgaaggtacaagcgaccggacaagctaaatagcagcaggcagaaatatagaaagaaggcagcaagatgacagagattcagaagcatagagcggacgagatgacgcccgtagagagaaaaaaagcaatcgaggaggggaaatcctacgaccgcgtgccctgcgtccctttcatgggagaactgaagggagtgcttagcggcatcagcgtgtgggatctgtcccatgacccggaaaagatggcggaggcggaaatcattcctttcaaccgctatggatatgatcggatggatatcgggcctaattccagggggatcacagaagccctgggcggcaaggtgatctatccagagaagggagttccttatatggatgcgccgctcatccaggattatgtaaggcttgaatctatagaaccggtggatgcccggacgaatgccagaattggggactttgcccggacggcgcagattcttgcggacaaggcgtttcgcattgtcccggtggaaatgagcatcggcggcccgcttacgattgcatccaacctgcggggcgtggagcggttgctgcgggacttaaggaagtgcccggacgacgcgctgaggctgatacggctggttgcggacagcgagagaagctgtatcgacctggcagcgcagtatggcatggggattgccatggctgacccggtggcgaaccccgcccttatcggtccgaagatgtatgagcggttcgtgtatccatttacgaaggaactgacggattacgcatatgaaaagaccgggaagaaggtatcgctgcacatgtgcgggcagacggagcagatctgggactattttaagaaatatgaactgaatgaggtaagtcttgataatatcgttgatcttgaaaaggcggcgcaggaattaggcccgtatatcccaatcgcaggaaatgtagacccggtggagatcatcctgaacggaaccagggaagagattacgcaggcggtcacatcctgcatcagcgctggccttaaatcccggaaggggtatgttctggcatcaggctgtgatattccagagaccaccaggccggagcagattgacagtttcatggaggcggcgagagcatatttttgcaggaaggaagcgcgatgatttcaaagttgaaagacagtcccttattccgtggcatgacgggggaggatatcgaatgctgtctgaagtgcagccatgcgcagtcagtcagatacgacaaggatgagatgatcttctgccagggcgatgctccggaaaaactctcggtgcttatagatggttcggtggcagtatgtaacgattccgcagatgggaggcggagcattgtggcatccattgacaagccgggggaattattcggagaggtctttgtattcctgggccaaaaggagtatgagcactatgcccaggcggctgttccctcaaggatccttcatatccccagggagtatttctactctacctgtgggaaagcctgcgtctatcatgcaaaactaattgccaatatgctggcgatcttcgcccagaaggcatactatctgaatcagaagatacagattatttcctgcgcgacgcttcggcagaagattgcgaagattctgctggagtatgacaaggcaggcgaaagtccggccattaccatgaaccgggaagagatggcggacttcctgaatgtagcccgtccatcgctgtccagggagttgatgaggatgcaggaggaagggcttgtcaaggtgacaaaaagaggcatctttgtcccagattcgttggcattgcagaaaattttatgattttgcgatccgtaacatttgttacggattttttttggcgttattggtagcattaggacatcaaagcaaaccaaccattcaagaatcaaggaggaaactactatggagaataaaatgttctgttaccaatgtcaggaaaccgcaggatgtgcgggctgcacgcagatgggtgtctgtggcaagaagccggaggttgcagccatgcaggatctgctggtttacgtgacgaaggggctgtcggcaattacgacgcaattaagagccgaaggcaaggaagtgcctgcggatgtaaaccatctgattactttgaatctgttcattaccatcaccaatgccaactttgacgaggaggcaattgtggaacgtatcgatatgaccctggcaaagaagcgaaagatgctggcgcttacagacagtacagattccctgccagaggcagcccgctgggactgcaagggacgtgaaggctatgtgggcaaggcagcccaggtaggggtattgtctacgaaggatgaagatgtccgcagcctacgggaactgattacctatggattaaaggggctttctgcctacagcaagcatgccaatgcccttcttgaagaggatgaggaggtggacgcatttctccaaagcgccctggctaagacgcaagacgacaggctgggcgtagaggatctggtggcgcttgcgctggaaaccgggaaatacggggtgagcggcatggcgcttctggataaggccaacacgtcggcctatggaaacccagagatgaccaaggtaaatatcggcgttggtaccagacccgcaatcctggtatccggccatgaccttagagacctggagatgctgcttgagcaggcgaaagggactgggattgatgtctatacccattctgagatgctgccggcccactattatccggcctttaagaaatattcccactttgtaggcaactatggaaatgcatggtggaagcagaaggaagaatttgaaagcttcaacggacccatcctgatgaccaccaactgtatcgtcccgccgaaagacagttataaagaccgcctgtataccactggcgcggcagggtatcccggctgcaagcacatcccgggaaagatcggagaggaaaaggacttttcccagataatcgcccatgcccggatgtgccagcctccggtagaactggaacgcggagagattatcggcggatttgcccacaatcaggtgatggcgctggcggatacggtagtggaagcagtcaaatcaggagcgatcaaaaagtttgtcgtgatggcaggatgcgacggacgggccaagtcccgtaactattacaccgattttgcgaaagcgctgccaaacgatacggtaatcctcacggccggatgtgcaaagtataagtataataaactggatctgggagatatcggggggattccacgagtactggatgcagggcaatgcaacgattcctattccctggcggtgattgccctgaagctaaaagaggtctttggcctggatgatatcaacgatctgccgattatttacaatattgcctggtacgagcagaaggcggtcatcgtcctgctggccctgctttacctgggggtaaagaacatccatcttgggcctacgcttcctgcgtttttatccgagaatgtggcaaaggtactggtggaaaactttaacattgcagggataggaacggtggaagaagatatgcagcttttctttggagaggaacggtagaaaaagcctggatagaacagatctgtaattatagaaacaatcaataagcacgattgtttatttaagttagcaatttgtatgcggcagcatgccaatggtagaatattcttgagtagtttaataaatttatagggagaggacgaaagatatgaaaaagaaaatcattagcatgctgctggtttccgccatggccatgacattgatcgtcggctgcgggaataatggggcagatgaaaagaagtccaaaggggatgaaaagacgctggaggtgtgggtcgctccgctggacgacgacacggtgaacaactggaagccgcttcttaaggattgggagaaggagaacgactgtacggttaacgtaaaggtagtgccctgggacagttatgaggagacatacacgacagctcttaactcaggcgaaggtccggacgtgggatatatgtacaatgagatgttcccttcatatatagattccggagcggttgttgacatgtcagagtatgttaccgatgaggacaaagaagagtataaatatctggaaaacggatatatgatggatggacagtatggatggccgctcgtgacgggagtgcctttcgtgctgtactataatgaagacattctggcagacctgggagagacggcgcctgagacttgggaggattttgtaagaatctgcaaagcggcaaccaaggatacggatggcgacggcaagattgaccagtacggctatgcagctggaatgagcaccagcgatgtgggagccatgcaggtactgaatgcatactattacagtgcgctttggcagaacggcggacaagtctataaggatgacctgaagtccgtagcttttgctgatgaagccggaactgaggcattgacatggatcaaggaactgacccagtatatgaatcctgatttcatgtcccagtcatggtcagaggcatttgccaatgtgttcggagaaggcaaggcggcattcggcgtataccgctcatcccagacggatgaaaccatgtttgccgagacgtatcctgacctgaaatgggactatgtgacttcccttaagaatgtggactatggaacattcggagcaaccgactgcctgacgctgatgtcggcggcagacgataaagaccttgcaatggatttcatcaaatacgtgacaggcgccgaatttatgaagcagtaccatgcaaaatgccccggcgcggcacttaccgtcagcgagccatatgtaggcgacgagaagatggagcgtatctatacggaggacattgataaatggcatggccttcaggcaggtccctgcggagtggacatcttaacgcagctttccgctgacttccagggcgtgatgacggaagagatgacggtggaagaggcgctgaaggaggctgaagattacgcaaacggcctgctggatgattactgggcagataaagaataattaatgagatacaaaaaatgtccgcttctattgcggacatttttttgagaggaacggtatggaaaagaaaaaaacaggaataaagaacatagcgccatatgcttatattacgcctattaccttgatccttgtgacgtttgtaatcggctccgtcatcatatccgtggtgcttgggtttaccaaatataatattatgacggaaccagttttttcggggctggataattatagaaggctgcttacagacagcaagtttattaaggcgctgaaaaatacgctggaactgatcgtcatcattgttccgctgcagactgtgtcgggcatcttggtatcttcctttctggtggccaaccgtaaaaaggtgctgggaaagattgccaattgcatcgtgtttattccggtgctctgcgcggatgcggtggctggagtcgtatggagggaattcctcaacggaaaacttccggtggtggaaaatttctttagattattcgggatagagccatccatgctcctgggcgatgccagaaaggcgctgatcgtcgtggggcttgtggcagtctggaagtatatggggtattacgtggtcatctattcttccggcctgctgtccatatccgatacctattatgaggctgcaaaggtagatggggcgggcaggattcgctgttttttcagcatcacgcttccaatgctgaagcccaccataatactggccgtgttcttatccctcaccaattctctgcgctgctttgatctgatcttcaacctgacaggaggagggcctaataatgccacgacaacgctggtgctgtatgcatactcctcctgctttggaagcagcaaggcaggctatgccatggcaatatccaacatgctttttctcgtggtgctggtgatcgcattgatgcagagaacgttgatgagaagagatgtctcggaactatagggagggaatatgaaagcaatagcaaaaggtttaagaaatggaatagattccatattgctgattggaattatcgtggtgaatgtggtgcctttcgtgtacatgttcatgatgtcattcaagtcaacgatcaatgcccgcgattttgatttttcgctggataagctttctttcgtccagtaccagaagatattcgcgatggacaattttgaacggtatatcttcaacagcgtctttgtggcagtggccggagtgatattgacggtgacggtgtgctccttggcgggctatgcatttgcgaaaatgaattttaaggggaatgaccggctgttcctcttcctgatactgaccatgatcgtgccgtcggaggtgataatcgtgcccctgttcctgattacaaagagcctggggtggctgaatacatttcgtgccctgattctgcctcttcccacggcattcggcgtgtttatcatgcgacaggcaatactggatgtgccgcaggacttgatcaatgcggcgaagattgacggttgtggaaatatcaggacattttttaaggtcgtgctgccgatggtaaaatcatccgtgctggcattgtccatatttacctttgtgggcgcatggaacaactttatctggcccctggtggcgtgtacaaagcaagagatgaagaccctgcctctggcgctgagtcttatgaagacccagttcaatacggacgtagggcttacgatggcctgcgctgtggtgaatttcctgccgccctttattttctatgtatttatgcagggcaagtttaaagaaggcatcgcgcttagcggtataaagggataatggcagttttaaagttccgtggcttcttccggcagcgatatgctataatagaagcatgtcaaagattatatatgtaaacaatattccggtcacaatcgaatacagaaaagtaaagaatatcaatctctatatcaagccgccggatgcgcaggtgctgatcaccgcgccgccacacgcgtctgaaaggagaatcagggattttgcaaagggaaaggctcagtggattgaaaagagccggaagcgcatgcttgattcccttgagggcagggcggaggaaacttccagatcgatcaccgatgcgcagttaggaaggcttgtggataaggtagaagaatatgcccggatatgggagccagtgatgggcgtgaatgctaccaactggaccttccggtacatgaagacccggtggggcagctgcacggtgaataccggacgcatacggattaatacgaggctggccttctatccggatgaatgcctggaatacatcgtggtgcatgaattgtgccacttaatagagccaagccataacaaaagattccatgcgtacatgacaaagtttttgccagactggaagatcagaaaaaagaaactttgccagtaagaaggtgggtgcagggcggtcctagaacagaagggacagtcccacgctgtggtcatcgtggccatgggacagtacaatatgcgtgatctttttcaaatccactcccagagagtgcgcgtttcgaatcataatatcggagtatccggcatcgaataggagcttcttatcatcaatttcataacgaattccccccttttcatccggtatctgcgcataaacgctttatctgtataaagtatatcggattccagtgggaaagcatagatacatgaagaaatgcaaaaaaggtcttgaagtaaaacttcaggaccttttgtttaaataatctagagattggattaggaataacaaaatcttgggggtgcttctaaagcatattttgtattccaagaacaatatatcacggagaaacttctttgaaaatagttttatgttacataaattagtaaaaaaattgtgcttgaagcacaaggatgatataataatacggacttaagaaataaatagacagacaggcgggtgtatatatgtggcagtagaattgaaggaactttatgaaaagatcagtccggaatatgaagtgaaactgcatacgacaggatgttttgaaaaaatgattggatgggtccacatggttgaggatccggaatttgcggatctgctgcatggagacgaacttatctttaactcaggcctgaactatacttcggacgagtggctttacaggttcgtggaggcgctgaataaggtccatgcaggaggcctgatcgtatctctttggggggagagggccttttcgcaggagatcattgattactgcaataagataaagtttccactcttctccgcatcgtggaagacaccttacattgacattatgcggatgttctcggtgattctcctaaaaaacgagcagaaggagacgaacctgattgctgcattgaagaacgccatttattacccggagaatgaagaactgtatctcagccattttgagagaaatggattcttccgggatatgtcctatacgatcgtcatacttagctgtcatgcctatgatatggagaatgggaatgaaagactgctgaggattgagaagtctctccactatattctgaaaaatgtgatcgtatacgaagaaaagggatgcctgatcatccttgccgcaggctactccctttcaaagatccgctcagatttccagcggctgtgccagagggattccaacatctatgtggggattggcacgacagcggatcagatccgggatatccacaagtcttaccataacgccaatacggcctaccagctgaccaagacagctattcctaagaatctgctggattacgacgaactgggcatctataagatattggcggatgtaaaagaggtatccatctatcctgcgtttgtaaaggagaccctagggactttgatagactatgacaaacagaatcacaaggagtatctgaagattctggatgaatattttcgccatgagtgcagcgtcattgagacctcaaaagcactgtactgccataagaacacgctgacctacaaacttcataaaatccgggacatcctgggatatgacattcatagcaacgagaaccgtacaaggattatggtagcgctctatatcatgcggctgggagaaattggaatctaacacgcatttaaaacagtctgacttttaaatttgtggtataatgttgggaacagcaagataagatacataggaggcggatgcaatgaatgagaatcggataaaacgaaatcaattattaggcgggcgtatcgttcagggactgaagtcccgcaatatggatggctattacgcagagacaaaagaagacgcgcttaagaaagcgttggagtggatatcggaaggaagcacggtcgcctggggcggctccatgtcgattgcagagatcgggcttaagaaggcaatctgcgaaggcaattataaggaatataaccgcgatgacgccaagaatccggaagaaaagcgtaagatcgagctggcaagctatgactgcgactatttcctcacaagcgccaatgctataacggaagatggagtaatggtcaacatagacggctttggcaaccgggtatcggccatagccgccggtccccgcaatgtcatcatgatcgttgggatgaacaaggtggtaagggatgtagagaacgctgtatcaagagccaggaatgaggctgcgccgatcaacgcgcagagattcgatattgatacgccttgccacaagacgggagcctgctttgactgcaagtctcctgacaccatctgctgtcagatgctggtgacaagattctctaaagttcctgaaagaataaaagttattctggtaaatgaagaattaggcttttaagatgttgactaaatcccgggcatttgttataatacaaatgctcgataaggcgccatagccaagcggtaaggcaaaggtctgcaacacctctatcaccagttcgattctggttggcgcctctataatgaagaagcctcggagacataatgtttccggggctttcttgtatgtaataacaaaacgtggcagttttgtggcagaagttaaaagggtggcatagaataatgtatagatatagccataaaaaggagggagtctatgcgatatacagagaatcttcgtgacaatgttgattttgggccagggccttttgtcgtaaacatcgcatgcgcaacagagagaaacccattttatcgcagggcaatatggactggcagtcatttgcaggttacgcttatgtgcataccaccgtgtggagagattgggttggaagtgcatccggataatgaccagtttcttcgcttggaacgaggcaggggcattattatgatgggggcatgcagggaaaggtttgaattccagcgtgaagtctgtcaggatgatgccatctttgtccccgctggcacctggcataacctggtcaatacaggggcagaacccataaaactttattccatctatgcaccgccacaccatcctcatgggattattcatcgaacaaaagcggaatcggatgccagaggggattaaaattatcaaagatgagtataataaaaaactggcgatgtatggatataccgccagtttttatgtctgttatttaagaaaagatagaatttagtatctctatggctatttcggtggcagtgctgccggtagcattatcagcattctgcaagtttgtcgcaaggtagtaaactcgttcgccgtgttcaataaggacgataaaccacccatttgaattttgcccgtcaacaactcctgtaccggtttttccatataatcttccgatagagatatcagaaacaaataaagaattttttattgcctgtatattctcttctttaaccatcccattctcgattggaagcatcgtaatggatgatgccttcttccaatgcctttgaaataggaggacagatccatagtttcttactttcttttctccgcctaaacgtgatagatgggagagaggcattgtgctgcagcctctgggtagaataaatattgtatcccttgcagcagctggtgaacccgatcttcgagattgcccaggcctatgacgcagtggtgatcgtgcatggctcggcggatctctataactgtccgctggaattcgaccggatggccaggagattcccgaaggtaccgttgatcatggcgcattgcggcttcttctgggagtgggagcttgccatcgaggtagccatggagaatgacaacctgtacctggagacctccagagtaccgggattcgagaccagcaaagtgattcagaaactaggcggaggcaaggtgatctggggaacggacgggccgttctgcgattatgaatgggagttcaacaagatccgccgctatgcgaaaaatgcggaagagtttgataagatcatgggaggaactgtgctgagccttctgaggaaagagtagtacagattaaggaaaagatgaaacagccccttccctgcatttccagcgggggaggggcaagttattatcctggtcggcctgaaatctatggctggccttccagtttcttaagtactttttctacgaatactttggcgtgttctacatccaggctgtcgggatgggtgatggcctcgtcgaaattctgaatatacatgtccatctggcctgcattctgttcatttttcatggatacgtatttctggcgtaccttctggggcatctttccctggcagatgaaggcccccaggtagtcgttgtccgtctcgatccacgcgctgacgctgttctcgatcgccttataatattccggcgcgtttcccattccgcaggtgccgaaaagagcgatctgcttgccgcttaagtcattgataaagtcgctgaccgccatgctgcaggtaccccggtgcacgcagaatccgatgaaatagacctcggcttccgggataggcttatcggtggtaatgtcaatcaggtctttggagttgccgggaaggcgcgagaagatagtcgcggctatttttttggtgttaccggtctcgctctgataaagaactaaataatctaacatatcaatcatacctcgctttcttaagaggcagcgttcctgatcaggactgtctcatgattatatatatcctccgggggctccgccaccgcagcataggccgcttccgccgcagcacaggttgcatacgatgttggcgatgcacagcttcatgcaccaactgctcccgtcggtaaatgtggtttggtaagggccttgctgctgctggtaccaggttccgccgctctcaaagcggtttaccagcatctgatactgtatgttgtccgggtccagacgaagagcctctttggcgtgctggagggcaatcacattattgccaagccctgagttggcaagggcactgtaataataccactgggcattgcgcccggacatgccgtttaatagattcaatgcttcctgatagtgtccgctgttgataaagttggccgcggcacgcatatgaaggtcctcttcgttttccgtaggatttgggccagcctgctggtattgaccccggaagccgcggaaggtgccgaagtcgccgaatccgccgaatccgccaaagtccccgaaggggccatagcctccggatgagccgtatccgccggaagtaccatagcctccggatgaatagttgctgccggctgttccgtattcccgctcgtgcatgatctgctggtatgcctgctggatttccttgaacttggcctccgcctggtccttattcggattgttaatgttggcgtccggatggtattttctgctcaggtttctgtatgccttttttatttcttcgtccgaggcgcttcttgggatgcctaagacgctgtagggatctatcataatttatactcctgtatctgaattgtcgcggtcagagtcgggtatgtcctttgaactgctgctgccagaacctgtcacattctctgcgtcattgcagccagtatctgcgctctcgccggattcctgccgcttggcggtaactgccgtatagcggcaccagacgccggaatataagacatttcgcaggatctccgcatgcagaagaattggcagtttttcgaattccctggaacactctgccatcataagcgtcagcagtccccggcagtttccggcaaagtcgctgtcatttgcgaatgcttctttcagaggattgtaacttctcgatgcaatatctttttctacatcttcataggcatccatcagataaatgaatttgcccaggaagaatccgatcttgcgaagagaggactcccattcgtcgggctgccatgcaaagatctccgccataatattgccgaacagtccggccatcaggtcaatattctgctcattttcctgctccagagacgaaaggcgcttcagattagaagcaatgccgtctaccttttccggatatctgccgcgaatggagtctactttcgacttcagcattcttgccgccatataccccttcctgctgcgctcgtcgtcccaatcgtccttgcatttataataggtaaggacaatgttgacggcagcggcgtaatcggtaaaatgattggtccgcgcaacatgcttttcgaaaggatgggctatgcagtttacaacctcccgctgtgtctgcggctcgtagaggccggtgagaagtacgatgagaaatgtcatgtcaaaggataaagtcatctgacctcttataccataacattctttcagacatttgcaaagaccacaatagtacgaatggtacatatcatagtctttgaatttcatctcggctttattgattgcaatatatccaaacataagaattccccgctagctgttcttgataaatgtggtattacatttggggcagcggatctctatacggccttttcctttcggcacgcggatcttctgccggcaggtaggacatttgtagatgtggtgcgtcttgcgctgggccatcatatttttctggcgggcgaagaagcagcggagcttgtaggtcttattcaaataccattggttctcggaggaacgcttgtagatgttccgggaaaacatgcggaaatatgcgtatataatgcagaaccaggctaccagggaaaggataaaactattcttccagcccgcgatcaacatgacgatcaagcctgcgatgatcgtgaatttccccagggaatccatcccatatcttccatacataaaacgaatcagtttttctctcaaaataatcaccttcctaatatacttacaatcatacgctatcacgcccataagtcaataaactgccgattaaaaatatataaagtttttgaggctgcattcccatattttatataaatatgatataataccgacaggtattgcctgcgtgtgcgggtatgtttgcaaggttcaggaaaggcggggagcattcatgagagaattaaccaggttgattaaagaagatatgaagccggcgcttggagtgacggagccgggggccattgcctatgcggtggcgagcgcaaaatcccatgtggacggcgaagtaaagaaggttcatgtggcattgaattccggcatgtataagaatgcttttacctgcggaattcccaattcgtccagatttggcaatctgtatgccgcagctcttggggcagtagcggccgacgcggctaagggactggaatcgcttgcggatattacgccggaggatgataagaaggcttcaaagatggtggatgaccataaggtggaagtggtgctggatcatatcggatctgagattacaatagatgccacggtggagacggagacagactcctgcacggtacatatccgccatagccacaccaatattgtttctatagaaaagaataacgagattatatatcaggcagatgcggatcatgcatcggaagcccaggcggaagatgaggtgcccgcgatccaccgctataccttgaaggaactccttcaatatgtcagggaggttccggtatccgagatagactttatccgggaggcattttccatgaatatggatctgctggaagaaggcatccagtcagaccggacaacgatcacgcggcagcttctgaaggagaacgggcacaagattatctccgaggatgccaaaagcaccgcccagctgctgtgtaacggcgccatcgaggcacgggtgctgggacttagccgtccggccatgagcattaccggaagcggggctcacggaattattgcgacgatgccgctgtttgcctattatcaggtgaactacgaagtagtggacgatgacatccttcttcgagccgctgccttaagccacctgattaccatgtatatcaaggaatactccggcaaactgtccgcattctgcgggtgcgggatcgcagcggggactgggatggcctgcgcgcttgcgttcatgaggaatgcggatgaggaagcgatcacgagggtgatccagaacatggcaagcggccttacgggcatgatctgcgacggcgggaaccatgggtgcaccatgaaaggaatcgtggcggtggacgcggcgtttcgggcggcagacatggcgatggatggcgtatgcattgaggacatccatggaatcaacgggcgtaccccggaggataccatgaggaatatgggacttatcgcgtctccgggaatggtgcagacggaaaagacgatcgtggaaattatggaacagaagtaaatgagcgagaggattggcatgaaggaagacaagaagcacagaagcaataataatagaaataatagcagtagaaataataacggcggtaataagagcggcagaaatagcggcagcgcagaccgcattggaaaagatgaaggccggggaagggacatccgggataaacggtatcatagaggaagaaagaaaaagaagaaagcagggattttttctacgatcatactggtagtcgcgcttgccgtattctgtttttcggcgttccagctcttcaagattctgaaaggctatcatgacggcagaagcgaatacgacaaagttcggaagtttgcggtggaagaaaagaagagcgctggggaagaccagttcagcgtcaattttgacgagctgatgcagatgaatccagataccatcggatggataagattccatccggagccgtcccagatcagttatccgatcgtaaaaggaaaggataacagcgaatacttgaagaagacattttcggcaaatgagaatacccttggggcaatcttcctgaatgtcgataacaatgcggactttatggacaagaataccatcatctacggacatcgcatgaaggatggctccatgttccggcatctgcaggattatgaagaaaagtctttctgggagagcaatccgtatttttatatctatacgccggatggcagggagatcacgtatcatatttattcggcgggacaggtagaggatacttcggatacctatcttacgtcctttgagtcggatgaggcctgcaagtctttcctgaatatgacgaaagaggtgtccctgtatgatacaggggtggaactgaatgcgcagagtaccatcgtgactttgtccacctgcaccagcgccagcgacaatcaccgcttcgtggtgcggggagtaaaagaaaaagaggtgaatctgaaggagcaatgaaaaatggatatatctatgaagtaggggacatcgtaaccatgaaaaaaccacacccttgcgggagcaaggactgggaaatcctaagggtcggagcggacttccggctgaaatgcacaggatgcgggcaccagattatgatcgcgcgcagactggtggaaaaaaatactaaggatttaaagaaaaagtcttgaaacaagcaccgaattatgctatcatattaactcgtgatacattaacatccgtaggcttaggctggcggatatccttgctcccacacaagatgagcgggggccaaaagaccagaaggaggtgcaagacgacatgaacaaatatgaattagcagttgttgtcagtgcaaaaatcgaagatgacgagagagcacaggttatcgaaaaagttaaagcattagttgaacgtttcggtggcaagatctctgacgtcgatgaatggggtaagaagagattggcttacgaaattcagaagatgaaagaagcatattactatttcatccacttcgaatctgaatctgatgttccaggcgagattgaacagagaatccgcattatggacaacgtgctcagatatttatgcgttagacaggaagcataagcaggaagtagaggtaattatatgaataaagtaattttgatgggacgcttgacaagagatcctgaagtaagatattcgcagggagataatccgatggcaattgccagatatacgctggctgttgaccgtagattcagacggggcagcgacggagaccagacagcagactttatcggatgcgtggcattcggaaaaagcggggaatttgcagagaagtattttcgccagggcctgaaggttatcgtaaccggacgtatccagacgggaagttatacgaacaaagacggacagaaggtatataccaccgatgtcgtagtcgaagaccaggaatttgcagaaagcaaggctgtaagcgatgctaacgcaggcggattccgtgcggcggctcccacaccggcaccagcaccagcatctgacgcaggtgacggcttcatgaatattccggatggaattgatgaagaattaccgtttaattaggttctgctaaggatagcaaggcagaatctcatcagattatgaaaggagaattgtgcaatggcttacgataaaggaaatcgtccggaaggcggcttcaagagaagaggcggcggacgcagaagaaagaaagtttgcgtattctgtggcaaagagaataacgagattgactacaaggatgtagcaaagttaagaaaatacatctctgaaagaggtaagattcttcctagaagaattaccggaaactgcgctaagcaccagagagcgcttacggtagcaatcaagagagcacgccacgttgctctgatgccatacgtacaggactaatgatagactgttactatgagagcgtgttgaggatgtcccgatgagggacatccttttttcgttgtacagcgtttgggtgtatggtaatagggaagatgcgaactgccatccggcaggcttaggaagaaatagtcttgttgcctgtgcagatcttagcaggcagaggatagccgtggaatgccggaatgctgagaggtggtggatgcctctgaaggcgggaatgtttatggggttaaaatcgcttgcagtgtttttggcggtcttgtgcgcgggcgtttcgttggcgggctgcggcctcgtggattctgcgcagcctgattctacgcattctgactcagtacattctgattcggaaaattctgattcagtacgttctgattcggattactcggaattgggagatgaggagatgcaggggaaggattttagaaggccttggctcaggcggctcggcggtacctggaggaaaagcagaagagttatgaaagccgggagaggattacgtttctatctgatgggaagaaaggtgaggagaacggcagtgactcggcggccgttattgtctcgagatattgcattgataaagacgctggagtcgttcgctgcgagtagcaagaagagggcgaggagcaaaaggatctggttttctataggaggatggatattattattttcaggctatgctggaaagtacggcttggtatagaatgccatcaaaggatgcggggataagttatgaggaaatagcctgtctgccggatgcgctgtataaagatgacgccaatgtgaggtatgaggaagtgaactaccggaaggctctggcagaaagcgacaaggaagaggataaagagaatcagaaaatcaaggtagaaggctcctatttataccagggtaaaaacgtgaatttttacggatgtatggtggattaataaggcggaaggcgaccttgtaaaatgcgagtcgtggcgggaatccgattcgggccaggagtcgcatgctgtaatcttcatgcagacgggggaggattgcgaaaagatccagtatttcccggaaagttatctggagattacaaaagaagaattagagaatggagaatttggactatgaaactgacaatattaggaactggaaatgctgcggtatcggaatgctataatacctgtttcgttctatctgataaggaggaatattttcttgtggatgcgggaggtggtaacaggattctgaaattgctgaaggacgctggaattgaattggaagatattcataatattttcgtcactcatgagcacattgatcatgtgctgggagtgatctggctgatccgcatgattggacagcgcatgaatcagggcaaatatgaaggcgacctgcggatatactgccatcaggaattggcggaaaagattcagacgatcgccagcctgaccatccagaaaaaagtgtgcaggcatatgggagagagaatccagttcgttaaagtggaatccggggaacagcgggaaatcatgggatgtaccgtaacctttttcgatattgcgtccacaaaagcaaaacaatttggatttactatgaaacttaagaatggcggaaaattcacctgtgtgggcgatgagccttataacgaagcgaattacgaatatgtgaaaggcagcagctggcttttgcacgaggccttctgcctgtacgcagaggcagataagttcaagccatatgaaaagcatcatagcaccgtaaaagaagcctgccagctggcagaagaactgggggttccgaacctcttgctctatcacacggaagagactcatttgaaagagaggaaagaactctacacagcagaagggcaggagtattaccatggtaacctgtacgtaccggatgatatggaagagtttataatatgcacgtaacagttttcgcatttacacgtaacaaaatgcaaaagtgttacgtgcctttcctgcacaactggtgtgtagaatcgtaccaactcctgtgcaaaaatgaaaagagcggtgtgttaaacagaaaatagttaacgaaaaaggcgatatatcaagaatcgaatgttaggattccagatataccgcctttttagttgtcctgtaatttttattaatgcctagtaacgttttgcaacggataattttcaatttgacacaggggttaagtcagttttacgcaccagttgtgtaggggttacacgtaacactttttcgttttgttacgtgtaaatgtaaaaactattacgtgttattttttctcttcccaccgtatctcgcagggctccagggttactgtcttgcagttgccatcgccatcgtagaatttcgtggtctgtgtctcgttggagttattcagaatcgcgtatttgccgctttctggatatgcgttgacttcgcagttcaggttatctgcgtaccatacgtggaaggcgtcttctttgtgcgccgcgtagtacatggctctcatgagaagtcgtgtgttctcgtaactgtatggaagtccggagatgtatacgccgcggccttttccgtaggtgttggcggccatgtggacttcgttgttggagtattcgatgatctccgtgtccgcggacagggcgtagatatcgtgctttacttctccgaattcgcagcaagcggtgcggtctttggtgatgaagtggctatctaacgccttggtgaaatacttgtccgtggagagcgtgtagcccagttctttgtcaacgcccaggatgtcggccagttggaagaagcgccccccgtggtgtacggcagtgggctctcccacgccgatgaagccgccgccttcgtatacccatttgcggatggcagtaaccagcgtttcgtccagccactcctcgccgccggagaaagcagtgcctgcatcgccggcgttgatgatgacgtccacatcggcaggcacgccgttttcgcggatatcgtcgaagctcaggaataccacgtcaacggcagcgccgcttagggattccaggattccgaagtaggagtaggtctgcttgtaccacagcgcatgagccaccatgtaggcctgccaggagcggagtctgccccaggaattgaggatggctactttgagtccgctgtagggctttttgccttttacgttgtcgtagatcaggcggaactcatccgttactttctcgatataatccacgaatttcgggaatttataagccaggctgagatagccgccatatccgattctgtctaccgggttgcgcatcagggcgcgccttgcactgagccagttgtcaatggcttcgatgcagggatcgttgccctcgtagaaggtgtccgggaagaaatagggaaggaatcgtccttctgtatatttcactcctggtatatcggagatgagacgcaaggtagcgccgccgcctacgcttccgactacggcatcaagcccgatgctttcaaaatacgggccgtagggctcggttccgatccagttgtctcccaggaacatcatggcctctctaccggcctcgtgggtgaggtctaccagttcttttgcctttctggcaacgaatctctggatgaaatccatatactggcggtaggctttggtgggcacgcggaaggtggagttgtaatagccgttgtccacgatatcttccggcctcagcgcgtaaccatactcttgctcgaattcttccagcgccttgatagatacggtagcgccatagccgaaccagtctacgaacttttccttccggtcggcgccgaataccagcgtaaagtgatagaagaaggtggtgaaccgcacgacatcggtatccgggttgtcgatcagccactgcttcaagtagtctttggcaaatgtcccggaatttgcctggcgtacatcaaaggggatgtcgtgaggcttgtccccccagtcattggtgatgtggttgtacatctgcgtaggatcccagatagcatatacgaagaaggataccgtgtattcatgaaacggcacagtcttctcgattgtgacaagatctttttcctgatcaacggaccagccggatgccggtacgacatcacctgtggtgcgatcgataacctcccaccatttcttcgggtcatgtacatagtcggcaatcacctgctcgcgataatagccgtccaggaaatcaatggtaacagaatcggatgtcgcaagattgtgcttggacatcagaagcatctgctggcactcatccatgtgttctttcgcaaattcattgtgccccctggctacaaaataggttgtatatatctttgcatccaaagacttaatctcatcatcaagtttcgtgccgtcgctgtccctgagggcatcggcaccccagcggtcaagcatttcctttgtctcttccagaaaattcgactcgcttggcaaggttactcttccttttgtctttgacataattctcctccttttatcaatatctatatttgagtatatgcaatactgctcaggatttcaatagcacgattgttgactttttttgtacttttgtgagttcacttttgcacaatcttgtttttgtcagcgttttttggtatattataattagcggacagggggcaaatggcagaagataacaaaaaataaaataaggaaaaggagttggcaagggtattgtctatgaaggtcgaggtaatcaatagcgccaaggagttggagaagttatcaccgtttcatgtggagtgtcttctgtggggaacaaaggaaataccggctacatacggatacataggatttgttccgggggatggcttctatatcaaaatggtatgcgaggagaaggaacctctgcgtgcttatgaaaatgatttggatccggtatacagggatagcgcgatggaagcgtttttcatgtttgagtctgagaaagaaaggagcggccttgcaacttatttgaattttgaagcgaatgccaatggggcgctgctggctgcatacggaaaagaccggacctaccggacttgctttaccaaagaggaattaaaaggctttgcgtgcgaggcgcagatactggaagaccggtggacgatcagtttccggatcggaatagacattctggagaggatatacggaccgcttcatctgcaagcgggcagcacctttacctgcaacttttataagatatccgaggcaaaggagatcgagcattatgcttcctattccccgatcaagacgactatcccaagcttccatctgccagaattctttgctatggcggagattgtcaagaggcagggacagaactaaagaacaaataaatcaatatattaatatgtatatcaaggaggatgtattatgagaatcatcaaagcagcagattatcaggatatgagcagaaaggcagcgaatcttatctctgcccaggtaattatgaagccggatagcgtactgggactggcaacaggctctacgcctatcggagcataccagaagctggtggaatggtgcaagaacggggatctggacttctcaaccgtgaaatccgtgaatctggacgaatataaggggcttccaagaaccaatgatcagagttactactactttatgcacgaaaatctgtttgacaaggtaaatatcaatccggcaaacacgcatcttccggacggctcggagccagacagcgataaggaatgcgcaagatatgaggcgctgatccagtctcttgggggtgtagacctccagcttctgggacttggccacaatggccatatcggattcaatgagccggcagatgaatttgacaaagttacccattgcgtagatcttcaggagagtactatcgaagcgaacaagagattcttcgcttccgcggatgatgttcccagacaggcatataccatgggaatcggcacgatcatgcaggcaaagaagatcctggtggtagtgagcggggaagataaggccgacattgtggcaaaagccttctttggaccagttactcctcaggttccagcatccatccttcagatgcatcaggatgtaacgctggtggctgatgctgcggcattgtccaaagtgcctcagaaataaggaaggccggacccggaagaagggaactgtaataaaaggcaggatattgaggtataagagtgaaaagaatggcagaggaaagtcagaaacttccctctgccattgctttaattgaagaagcatattcagaaggcgtcattccggtcacctttttgaattgcctggaaaagtagtggatggacgtgtagcctaagtgctcggatatctgagtaaaattcatacgattggtccggatcatctccttggcggcattaatcttaagaagggaaaagtattcgataatgcccaggttgcagtgctccttgaatatcttctggagctgggagcggccgatcaggttgtcccggcagatctgctcgatagtcacgtgggaactcaggttgctctccaggtaatccgccacccggttgaagatctccgtgtcgctcttactcttggtagccttgggcggctcgatcttagggagccgctttctcaccacgattggattggaatatcttcggatgaggtggatgaggaaatgctccaggtataagcggatcaactgctcggcgccaaacatatccgggtctttctggggcatattctgcagataggggtcgtccaggcggcagtcaaagcatcgccttgcttctattataatgtctgccagaagattccgttccgtctcgtcaatccgcagaatccgcttcttgaagaaacgcatggcctcgtcctcgcacttgaatgagattaccacaagattgggcgcggtctccccggtagcccttacattgtggaattcatttggctgatggaatgccacatcccctttcttaagcacggtaaatgtcttgccagcggttaccccgacctctcctttgtctacgcagatgaactcccaaaaattgtgggattccccctcaaaggtgaagtcgctcatatattcaaagtagtgtatgctgtatatcttgcttacggatattgagttcctgagattgattccattatatcccatatctaaacctctcttttgtgaaatgtataaaaagtctggtaaaattttttggtcattcttactaatataataccttattttttgtataaaatcaaaacaaaaatgcggatagtgcaaattaagaatattttcagataaagatttttgtgcacctttataatacaatggatacaagcaacaagataatctttataggaggtaaagtattatgaaaaagaaaattgtaagtgtgcttttgtgtgtagcgatggttgcaactatggcagtcggctgcggcggaaagaaaaccgacggagacggcggaagcagcaagggcggagacaaacttgtttactgggcaatgtggagcgaggatgagccacaggcaaaggtaatcaaagacgcgatcgctaagtatacggaagacacaggcgtgaaggttgatgttcagttcaaaggccgtaacggacagcgtgaaggacttcagccagcactggatgcaaagcagaacattgacttatttgacgaagatgttaaccgtgtaaacggaacatggggcaaatatctgatggatctggaagacatggcaaaagactatgaggcagagcacggcaatgagacactgttcaagattgcacgtaatgcatatggtcagactcatgacggagatgacacattacatacgattccttatcagccttctattttcggattcttctacaataagacattgtttgacaaagcaggcatagaagccgttcctacaacatgggaagaattggatgcagcatgtgcgaagttaaaagaagcaggaatcactcctatcacagctgatgatgcttatatgacatcctttatcggaatgcatcttgcaagatatatcggacaggacggcgtaaagtctcttgttacaggcgaggaagtaaacggcgaatctgttaaatgggatgacccaagagttcttgcagcagcagaaagttttgctgattttgcagagaaaggctacttctctaagaacatcgcaacaaacaaatatcctgcaggccagaaccaggaattcgctcctggcgaagctgcaatcgtaatctgtggatcttggcttccgaacgaagcaaaagaatctgtagcagacgatcttgagtggggctacttcaactatccatcagttccggacggaacagatgacagcacagccaacaacattgcaaaccaggtatttgcaattaacaaagattctaagatggctgacgaagcattcgagctgattacttatatcaccactggcgaatttgacaagaagatgacggaagaagctctttgcatcccgacagacaaggcaaattctgatgcttggccgacagaactggctggcgtgaaagaaggctttgatgcaactacaacatactatgactgggcagcaggcgttgagagcaacaacgaccttacaccagtacttcagcagaatacgcttgaccttgcggctggcaagattgacgcggcaggattcattacagcaatgacgaaagctgctggacaataagaactaaaaaagttatacttgtcaggtaagacaagtgcacaatatggtggcagggcggtacactacgctgccaccatattttatagagaggaaaaggagggcatagcaaatgaagaagaataagaaaatgataattggctttattgcgcctgcggttatcatcttcctcattgtattcttatatcccattatcaggacaatcatgatgagtatgtataagattgagtctgtaacggataccatggaatattggacatttgtgggattacagaactatcagaaactattcacgacatcaatattcaagacggcgatgtttaatattttcaagatctgggccatcggcggagcgattgtattggcagtatctctgctgtttgcagtaatcctaaccagcggagtccgtgggaaaaaagcatttcgtgcaatcatatatctgccgaatatcgtcagcgcggttgcacttgcaacaatgtggctgcagtacgtatacagttccaagtttggcttgttaaagtcattcctggattccatcggccttcataagctggctgacactccatggctggacacggatcataagttctgggcattgctgtttgcatactgcttcggcatgatcggataccatatgctgatctggatgagcggtatcgagagaatcagtccggatctttatgaagcagcaaccattgacggcgcaaataagccgcagcagttccgttttatgacacttcctctcttaaaaggcgtgtttaagaccaatatcaccatgtggtcagtcagtgcggcggcattcttcgtatggtctcagctgttctccaccgttacggcggataaggccacgatcgtgccggtacagtacatgtacatgcacacgttcggagccggcaatgcggtgacagagagaaatgccggatacggcgcggctatcggcattatcctttgcctgtgcgtcgtaattatatttacaatttgtaacaaacttatcaaagatgacgatcttgaattttagaaaggaggagcggttatggctaaggaaaaagaaaaaaaggttagagaaaagattaattggaaaaaagaatttaaactggctcccggatatatcgtcatcatcttatgggtaatatttacattcatgcttcttggatggatacttgcggccagtctgtcaactacggcggatatctttgccggcaaggcgctgaagttccctacgggactgcattttgagaattacgcgcaggcatggggatccggaggtgtcgctacgttcttcatgaactcattgctgtatgcgctggtatcttgcgtgctgctgattttgatctgcgctcccgcggcatacgtactgtcgagatttaccttccttggaaacaaggtaattcagacaagttttgtgtctgccatgggaattccgatcacgatgatcgtgcttccgctgttcagcatagtggcaaacatgggaattctgaacaacgtatttgccagcaagattacgctgatcttcttatatataggaatcaacattccatacaccacgatcttcctgctgacattcttctcaaacctgtcgcggacatatgaagaggcggcagccatagacggatgccctccgacgaagaccttctggaagatcatgttcccaatggcgcagtcaggccttgtaacggttacgatctttaacttcattaatatatggaacgaatatttcctgtcattaatatttgcaaacaacgacgctctgcgtccggttgccgtaggactctacggaatgctccagtccatgcagtacacaggaaactggtcaggcatgttcgcggcagttatcatcgtattcctgccgacatttatcctgtacatcttcctgtcagagaagattatcggaggcgttaccggaggcatcaagggctagtcgtttgaacattacatacatatttataagcttggaggtagaacaatgaataagccagtattggttatcatggcggcaggaatgggaagccgctatggtggattaaagcagattgacccagtagactcagatggacacattatcatggacttttccatgtatgatgcgaagcaggcaggatttgaaaaagtaatctttatcatcaagaaggaaaacgaagcagactttaaagaggctgtgggggaccgtatggcaaaatatatggacgtatcctatgcgtaccaggaacttgccagcattccggagggctatgaagttccggaaggcagggtgaagccatggggaacggcgcacgcagtcttaagctgtatctctttgattgacgggccatttgcagtcatcaatgcagatgattattacgggcaggaagcatttaaattaatctatgattatctagcatcccaccaggatgacgacaagtaccgttacaccatggtgggctaccatcttggcaatacagtgacagacaacgggcatgttgcccgcggagtctgcgatatgaatgaaaagggcgaactgatcgctatcaacgaaagaacctggatcgagaagcacgatggcggcattgcctttacggaagacgacggagagacgtggaactttgttccggcagatacgacggtatctatgaatatgtggggatttaccaagagtattctgaaagagatagaagaaggattcccggcattccttgacaaggggcttaaggagaatccgatgaagtgcgagtacttcctgccgacggttgtcagcaatcttctgggcgaggaccgggcaaccgttgcagtcctcaagtccgcggataaatggtatggagtgacttataaagaggataagccggtggtagtggaagccattcagaagatgaaagatgagggacgctatcctcagcatctttgggaggaagcataatggaacatgtgacacagaagcaaagagacgaagtggtcgcgcactttaagtataagggaattcttatagatgagcggccttacggaagcggccatatcaatgacacatttctgctgacttttgagattgcggagatgggacagctgaaggtgatcttacagagaatgaataaggaggtattctccaatccagtagaactgatggagaatatcgtgggagtcacctcttacctgcgggagcggatcattgaaaatggaggcgacccggagagagagaccctcaatgtcattcctacggtggatgataagccctactatctggactcctacggcgactattggcgctcttacaagtttattacggatgccaccagttatgacaaggtggagaatccacagcatttttaccagagcgccgttgcatttggcaatttccagaggctgctggcggactatcctgccgatacgcttcatgagacgatcgtaggattccatgacacgaaagcgagatttgccacatttaagaaagtggtggaggaggatgtcatgggaagggcagcgtccgtgaagaaggagatccagttcgttctggatcgggaggacatcgcggattatttctctgaccttcaggccaagggagagatcccgcttagggttacccacaacgacacaaaacttaacaatattatgattgataataagacgggaaaaggaatctgcgtgatcgacctggatacggtcatgccagggcttgccatgaacgattttggggactcgatcaggtttggcgccagcacggccgcggaagacgagcagaatctggataaggtatcctgcagcatggatctgtttgacctgtatgcaaagggctttatcgaaggctgcgccggaaaactgacgaagaaagagatagacctgatgcccatgggcgccaagacgatgacgttcgagtgcggaatgagattcctgaccgactatctccagggggacgtttacttcaagattcacagggatggacacaatcttgacaggtgcagggcgcagttcaagttggttgaagacatggagaaaaagtggtatactatgcaggacatcgttaagaagtatagtaacagttaggaggtagaagaatggcgaaaatattgattacaggcggagctggctatataggaagccatactgcgctggaactgctggaagagggctacgaagttgtcatctatgacaatctttccaactcttccagggaatcagtcaagagagtagaagaactgacgggcaagtccttgaagttctatgaaggcgatgtactggacgcagacgcgctggaagcaatgtttcaggcagaagggatcgatgctgtcatccattgcgcggcgctgaaagcagttggggaatctgtacagaagccgttggaatactaccataacaatataaccggaacattgaccctgatgggcgtgatggacaaagtgggcgtgaagaacatcgtattcagttcttctgccacggtatacggaagcccggagataattccgatcacggaagaatgcccgaagggacagtgcaccaatccgtatggatggaccaagtccatgatggagcagatcatgacggaccttcagaaggctcatccggaatggaacgtcatcctgctgcgctacttcaacccggtaggcgcgcataagagcggacgtatcggagaggatccaaagggaatcccgaataatctgatgccttatatctcccaggttgcagttggcaagctggagaggctgggcgtattcggcgatgactatgacacgccggatggaacgggcgtgcgtgactatatccatgttgtggatctggcgcgcggccatgtaaaagccatcaactatatctttaccaatccggggcttgatatcatcaatctgggaaccggtgttggctattcagtccttgatatggtaaaggcattcgccaaagcctgcggcaaggagatcccttatgagatcaagccgagaagagaaggcgatatcgccatgtgctatgcagaccctgcaaaggcagcgagagtcctgggctggaaggcagagcggggcttagaagagatgtgcgaggatacctggagatggcagtcccagaatccaaacggctacaaagaataagaaaaatgatgcagcagacaggaatgtcttcggaatggaagagattcctgtcttttattttgcgcgaagaagtggtataatatttgcatacattgtgttttgtgaaatgggaactttattaatttagaggatgaagttatgtcagaaaagcaaaaagagaatggaaaagtgcatttgaaaggacaattaagactgtacatgcagtggccagcgatcatggcgcttctgcttgtggccatgaatatctggatctaccggatcaatcgtcgtgccggatccctgatgttcatatttgtcctgatttatattatgatggtgggcgttctgtatctgtacagcaagtccattattatgaaagacctggtagagtttgctgcccagtatgggatcgtgcagaatacgctccttaaggaactggccgtaccctatgctattctgctggatgacgggaaagctatctggatgaataacaagtttcaggagatattaggggggaagcccaaaggcgaatcctatatcagcaaatatataccggaattgaataaaaacatcttccccaaggaagttgatgatacggtagagatggatgtctattacgaggatcgtgagtataaggcagagcttcgcagggtatccgtggagggattcagcgatatggaacaactgctggagatgccgatggagaaggaatactttatcgccgtatacttaagggatgtaacggaactgaaccggtatatcaagcaggcggaagagcagcggttgattgcgggcctgatctatatcgataactatgatgaggtcatgagcagcgtggaagaggtgcgacagtcccttctggtggctttggtggatcggaagattaaccagtatatcgccaaggtggacggcatcgttaagaagatggagaatgataagtacttcatcgtctttaagaagcagtattttaagcagttggaggaggataagttctccctgcttgaggacgtgaagtccgtcaatatcggaaatggaattccagctacgcttagcatcggccttggccttagttgcgacgcctatgcccagagttataactatgcccgcgtggcgatcgatctggcgctggcaagaggcggagaccaggcagtcattaaggatggaaaaggcattacctattatggaggaaagcgagagcagacttccaagaatacccgcgtgaaggcccgggtaaaggcggaagccttgagggagttcataacggtcaaggataagatattcgtgatgggccataagcttacggatgtggacgcgctgggggcagccatcggaatctaccgcgcggcggcggctctggagaagaaggcttacatcatcatcaatgaggtgtccgcgtccctgcgccctctgtatgaaagttttgagcgggatccgtcctatccggacgatctgttccttaactcgtcccaggccattgatcttgccgacgagaattccatggtggtggtagtagacacgaaccgccctcagatgacggagtgcgaggaacttttgaagaagtccaagacgatcgtggtactggatcatcacaggcagagcagcgacaacatcgacaatgcgctgctgtcttatatcgagccgtacgcatcctcggcctgcgagatggtatcagaggtactgcagtatattgtggatgatattaagattccaaagattgaggccagcagcctttatgccggcatcatgatcgataccaataatttcgtgaaccgtacaggcgtgcggacattcgaggcggcagcgttcctgcgccgctgcggcgcggacatcacgctggtccgcaagatgtttcgggatgatatggagtcctaccgtgccaaggctgagattatcagcagcgcggaagtttatcttgagaagtttgccattgcaagaggcgagaatcttcatatagaaagccctacgatcataggggcccaggcagctaatgaattgctggatattaatgaggtcaaggcaagttttgtgctgacggagtacaatggaaagatttatatcagcgcccgctctatcgacgaggtgaatgtccagatcattatggagcggctcggaggcggaggccatatgaacgcgtcaggcgcgcagttcaatcatactgacatggaggaagccgtggcatctttgaaacaagtaatcaacgatatgacagaaggaggagacatctaggatgaaggtaatattgacagaagacgtaaaatcccttggaaagaagggtgaaatcgtagaggtaagcgacggatacgcaagaaactttattttaaagaagaaaaagggcctggaagccaattccaggaatttgaatgacctgaagcttaagaaggctaacgaagacaagattgcccaagagcagtatgaagcggcaaaggaattgggaaaagagatcgaagcaggaaagattgaagtatccatcaagacgggagagggcggcaaggcatttggctctgtatcttccaaggaaatcgctgcggaggttaagtcacagatggagcttgatattgacaagaaaaaaatacagttgaaagagccaatcaagacgctgggaacgcatacggtatccataaggctgcacccgaaagttacggcagaccttaaggtggtcgtgacggaagaggcttaggaggagacttagcatggaagaggcgctcattaaaagagtaatgccacacagcgtagaggcggagcagtccgtcgtaggcgcgatgctgatggataaggatgcgattactacggcgtctgagattatctccggcaacgacttttatcagagtgcctatggaattatctttgattccatggtggaactattcaatgaaagcaagccggtggatttgatcactctgcaggagaggctgaaggagaaggacgtcccggcagaggtcgccagcctggaattcgtcaaggagctggtgactgccgtgcctacatcggcgaatgtaaagtactatgcgcagattgtagcggacaagtctatgatgcgcaagctgatcaagttaaatgaagagattgcgaatacctgctatgcgggaaaggaatccctggaggcagtgcttgagaagacagaaaaagcggtgttcgatctgctgcagaagcgcaacacaggcgaatatgttcccatcaagcaagtcgtgctcaatgccctggacagaatcgagaaagcatccaagaataagggaacggttaccgggatccctaccgggttcattgatctggactacaagctctcgggtctgcagccctcagatctggttctggtggcagccaggccgtctatgggaaagaccgcgtttgtccttaacattgcccagtatatggcgtttaagaaggataaaggcgtcgccatcttcagccttgagatgtcaaaggagcagctggtgaatcgtctgttctccctggaatcccaggtagatgcccaagccttaaggaccggcaatatgaaggattcagattgggagaaactgatagaaggcgcaggaatcatcggcaaatccaacctgatcatcgacgatacgccgggcatctcggtgtctgaactgcgatccaagtgcaggaagtataagctggagcacgggctggatattgtcatcatcgattaccttcagttgatgacgggaagcgtgggcaagaattccgagtccagacagcaggagatctcagagatctcccgttctttaaaaggactggctagagagttgaatgtaccggtggtagcgttgtctcagcttagccgtgcggtggagtccaggccggataagcggcctatgctgtcagacttgagagagtcgggagccatcgaacaggacgccgacgtggttatgtttatctacagggacgagtattataataaagattcagagtttaaaaagcaggcggagattatcattgcaaaacaaagaaacggccctgtagggaccgttaatctggcttggcttggcgaatatacgaagtttgccaacctaagcaggcaagaataatttcttcagtttttccactgggccggttcccgcggcagactttcgaaaggattgctgctgacggatgagctggtccagttttctgaattcctcctcctcctgacgttctttggcgtccagaaggaaggacatttctttgctgatcatggacagcaggacttcattgttgttctcgagcattcgcttgatatgtaattgctcccttgtcctgcggatatccggaatcagcgcctttaattcggagaaaggcaccccttgctcgtacagttccttgatgcagctgtaaagcttggcatcatcttttgtctccctctttaattgttctaatgcattgctacccatagtctatacccccttatcacaacttgtccttctgggtttctatatcatagcatggacgcaggagaagaatccgtcataacccgtcgaggataatggatatctttaaattcttaaggacaaaaaacgctaagataaggacgatattttggcaaaaaaaagaattgcatgtccacaattgtgacatgcaatgtctcttttaaaacattatccgcatatctgactagccctgagaaattgctcctgtaggacactgagcagcgcaagcgccacagtcaacacaagcgtcagcatcgatctcgaaatgatctgctccctgagagattgctccaactggacattctgcctcgcaagctccacagcttacgcactcatcactaattacgtgtgccatagtatgtaccctccttttgattatatagatagacataaaccaaatttagtctatccatatcataatacaaacggtcaaaatatacaaggggtgacgcgccatttttaatattagtacattcggcccggttcctgctcgcaggcaaagaaaaatcccagtaaaaaattaagaaaaatttcaacaattattcaccgttttggtgtatagtgtaatttgttgaatgtagacattagaatatgggagagaatgcataatgaaaaagagaagtagtatcatagccattttattgtgtgcagcgatgcttacatgtgcatgtgcggctcacagtgatgataaagtagaggagcctgtacaggcagagaagcagaaagtaaaagtgaaggaatatcaggggaagttggatatcatagagccgggggcgtataataacgtgaacggcctgaatctggagccaggttcctatatttccgtgatcggcaaggctgacggcggacagttctgggaggaagtgaaaaagggcgtagaccaggcggcgagggatatcaataaaaatctgggatacgagggcaaagacaaggtgaaagtgacctacagcggcccggcagcggcagacaatgtggatgagcaggtgaatatcctggatgaggaactggcgagatatccggttgcccttggcatatccatagcagatgccaaggcatgcgaggtacagttcgatcttgcggcggaaagtgatatcccgatcgtggcttttgattccggaagcgactaccaggggcttatggccacagtcgccaccgacaataaggcggcatctaaggaagcggcatccaggcttgcggagattatgaaggaaaccggcaaagtcatcctctttgcccacgattcaaagtctaaagccgcgattgaccgggagaatgcatttaaagaagagatgcagcagaaccatccgggcattaccattggcgatgtctaccatctggaccagctggcagatctgcagaaaaaggtggcagaagagatcaacgcaggaacctataaaaagggtggagaggctacaggagagaaactggatgagcaggatgaagtcacgccggacagcattacggaagacgacgtggtcgattacgtgctggctaagaatccggatgccaagggctgctttgcaaccaacagcgatgcgatgaaagtggctcttaacggcctggaccgcatggaagaagaaaatatcgcgcttgtgggatttgatgcggatgaagaagaaataaaagcgctctcagatgggaagatcgacggcctgatcgtccagaacccttttggaatgggttatgccacggtcatagcgtccgcaagggcggccctggaaatggggaacgaagcggttgtggatacgggttatacctgggtgacgaagaagaaactgaaagacgagaatgtagcgaagatgctgtattagggtgattttgtgatataaaatggatggcggattggaagcggacggcgcggggaggcgtaccgggcagcggtgccaatccactaaattccacgcatcaagccttcggcagcgaaaaaataaactctgtccccacgccttccgtgctcaccacattgatattttccccatgggcctgtatggcttctttgacgatggccagtcccagcccggttccctttttgtccttgccccgggagaggtcggtcttgtagaagcgttcccagatcttgttcagcgcattccttgggattccgatgccataatcttttacggaggtatagatcttgtcgccccgctccgtggtctcgatggtgacggtggaatcggtctcgctgaacttgatggcattgtccagcaggttgtagaggacttgctggatcttgcgcttgtcggcagttacgtttaagtacttggtggcaaatattaattctatggatattttcttctgtgtgcaggtgccttcaaaggcagcggccacgttcttgatcatctcatgaatatcaaaaacttccttggtcagaagaatatttttcgtatcaaattcgttcagggtcaggagatcctgggtcaggtctgtcagccgctctgtctcaaagaggatgatcttcaggtatttttcatgcatttccggcggtatggttccatccgtcatggcttctacataccctttgatggaagtgaggggagagcgaaagtcgtgggatacgttggctacaaacttcttctggtagtcttccatatctttcaactgggaggacatgtagtttaaggaggcagacaggtagcccatctcgtcctccgtatctacgggtatctcgtaatccaggttgcctgtggcatactgggtggcggcctccgtaatcttgcgcaggggccggtatacgaagaactggaatcccagaaggatgatgaaggacagcaggaagatgacgatcagcgttatgtaggcagcctgcataagaatcttctgaacatcttccaagtcagatacgtacttgtggatcagcagatagccgttgggggaatacccatatacgacaggcgcaacgacggtgatgacgtcttccttgaacaagtcatgataggtccctatctggtactgggagcctccgccctctgccgggtcaaagtcctcgatgacggcgggggagaggggataggtctctgactgggcagaactaataacctctccgttgcgatccacgaaccagacggatgcccccagttgggactcgatccctgtcagctgcagatggacgtcggaggcggttatctggccggaaaaatatttgggcagatagtccgcggccaccaggctggcctcccggtacatgctggaagagacattttcctttaacggcccgttggtcagtccggccgtcagcgtggcaacggtaaagaggctgagaaagccgaatatgatatacatgatgataaatttcagatataaagtgctgcgcatgaaggttcctctttatctatttgacttcgaatttatagccaatgccccagacggtgctcaggctccagtcgctgtgatccttgatcttctcccggagacgcttgatatgtacgtccaccgtacgcgtgtctccaatgtactcatagccccagatctgatccagaagctgttccctggtaaagacctggttgggggaggcggcaaggaaatacagcagttccagttcctttggaggcatatctaccgtttctccgtccacaatgacggagtagttggtaagattaatggtgattcccggatattccacgcattttcccttatcctcgcccggaatctcgggcttcgggatcgcctggtagcggcgaaggactgccttcactctggccaccagttccttagaatcaaaaggcttcatcatatagtcgtcagcccccagttccagtcccagcaccttgtcaaatacctctcctttggcggaaagcatgatgataggcacgttggacttggcccggatctcccggcatacctgatagccgtcgatgcccggaagcatcaggtccagaagaatcaggctggggtggtaagtgtcgtaggcaatcaaggccttttccccgtcgtggaccatcatcgtatcaaaacattccttggtaagatacaaggagatgagttcggcaatgttctcatcatcgtccacaattaatattttctgcttatttaccatgttgctcctccttataattgtcctctatattaatctactttagttctacaatggtcacgccggcatcgccttccccaaatgctcccagccggaaggacttgacgtgcttctgccgtttgagatagctgtggattccggatctgagggcgccggtgcccttgccgtgtaccacgcggaccgtggacagatgcgcaaggctagcgtcatccagatatttatccagttctgccacggcttcatccaccgtcttgcccagaagattgatctcagggcttacggagaaggatttgcccatctttaacttgccttttcccgtcttttgcatctgcttggcagtgtaggaaggcttctcctcaataatctccagatcggaaatattgacctgggaccgcaggatgcccatctggacggttacatttcccttagaatccgggagggcagtaacggttcctgtcagattcatgcttaagaccttgacggattcgccaagcttgaagtcgccgggcttatgctgcttgcgcggcttctggggctccatcttcatgccggaacgggccgcgtccatcttcttgcggagacgttcccgctccttttccatctctgctgcggaaatgctttccttgccaaacttgcggaaattgcgcatggtctcgtcggccgtctcttttgcgtccgcaagaatggagtgggccttttcgttggcctcccgcagaatccgctcgcgctgggcttccagcctctcctgcttttccttggtctcggccttgagtcgttccagttcccggcggtatgcggcgatctcttcctgctccttctgaattgtccgcttgctggtctcaagatccgtcagcagatcctcgaaggattcatcctgctccgtcagatgggtcctggcctcctcgatgatatagtcgggcagccctaacttgcctgcgatggcaaatgcattactcttgccgggaatgccgatcaacagatggtaggtgggccgcagagtctccaggtcaaactcgcagcaggcattttccacgccgggagtggacaaggcgtagaccttcagctcgctgtaatgggtggttgccatggtgcggatgcctctcccatgcagatggttcaatatggcgatggcaagagcggcgccctcggtagggtcggttcctgcccccagttcgtcaaacagaaccagggagcgctcatccacctgctttaagaaggagacgatattggtcatatgggaagagaaggtgctgaggctctgctcgatactctgctcatccccgatatctgcataaacgtcatggaatacggccagttcggagcggtccagcgcagggatgtgaagccccgcctggcccatcagcgtaaagaggccaaccgtctttaaagagacggtcttgccgccggtgttggggccggtgatgattaaaagatcaaaggcatcacccagcatgacggtgatcggaaccaccttcttcttatccagaaggggatggcgtccctcgcggatatagatgcgtccgtccgtgttaaagaggggcatggaggcattcatatccagcgcaaggattcctcgcgcgaagataaagtctaattccgtaaggacggagtaatccgtccggatcgcgtcaatatattctgccacgtccacgctgagacgtgccaggattacctggatctcttcctgttccttgccgtagagttccttcaagtcattgtttaacttgaccacggacatcggctcgataaaaagcgtggagccagtggaggattggtcgtggatcagtccctgaacctggcttcggtactccgactttaccgggatgcaatagcggtcgccgcgcatagtaatgatggtatcctgcagatacgcgcgcaaagacccgtttaccaggccggatagggtggcgtgcaccttgtcgttgatctggcccatggaacggcggatgcgcttaagcgccgggcttgcgtcgtcgctgatctcatcctcctccaggatgcaccgccggatctcggcggacaaaggagccaccggttccagctgctggaacagcgcatccaggcagtcctcggactcgtcgctggtctcgtgccttccataagatttgacgcgtcctgcggtttccagcaatttgcagatgcggagcaattcgccgcttccaagggcggcgcccacctccaggcgcttcaacgagtctcctaccggattgcatccgctaaaagaaggcctgcccttcttgacgatccgcgtaaatgcggcggcggtttcctcctgggcagactgaatgtctgataaagatatcataggttttaacttccggcagcgctctttgccgctgaaggaagaagcctgttctgttaagagttcaataattttgttgtattcaagttttgtcaatgtttttttattcatgttattcacctagacttattctaccctatttgccccataaagaaaaggataaatattgaacatttgagcgccataaggtatactatagaaaggattgtaaaggagaaggatgcgtctatggaagagcataaagatccaggagaagaaataaatcgggaagaagaaaaagagcaggagtattcatttctgcaggaaacgatcaaagatgagacaatcagcaagaagaaagtaaaaaaagatatcttccggatggccggactaggcctggtgtttggtctggtagccagccttagtttcagtgcgttcaagccatggatggacgagttatttcaaagcaatccgcagaaagtcacgatacccgaagaggaagaggaagcagacgaagccacgccggaagacgagccggaagcgacccagcaggttctggacgcagaaagttaccggcagatgcagcagtctctgacatcggtggcctctgaggccaacaaatcggtggtggagatcgccggaaccacgggagatcaggactggatgaacgattcctatgaccataagaacagcacggcaggactgatcattgcagataatgggcaggaactgctggtatttggcaagacttctattatgaaggaagcaggcgatattcatattatattttccgatgggcacagttataaggcaagcctgaagaaaaaagacggcaacctggactttggaatctatgcggtaagccggggggatatccaggatacgacctggtcccagatcaaggcggcaaccctcggcagttccaactccgtgtccaaaggtgacccggccatcgtgcttggaagtccgtttggatacgcgggcgcagtaggatttggaacggtggcctccagcaagaattcggcggagttcgcagacgggcaataccggctgatctgcacggacattgcaggagcaaggaacggaagcggcgtcatcgtgaatctaaaaggcgagattatcggcattattgaccagagcgtttccgaggaagacagcatgaacctggtgaccgggttcggcatctcggacattaaagagatgatgcagtttttgctaaatggacagggcgtcccttacattggaatccggggcgtggatgtcacccaggagattgaggctcagggaatccccaagggcgtctatgtaaaggaagtggagaccgattctccggctatggcggccgggatccagtgcggcgatatcattacgaatatcaatggcacggatgtggctacggtggcgacataccacgctgcgcttatggatttggaatcaggcaagaagatcaagatcaaagggtatcgccaaggcgcaggcggctatgtggatatagacttcggcgtgacgatcggcagcaaagaataagacaagttagaaagaggcaaacatatgaggtatatcaacaccctctgcgagggagagactatcaagaacgtatacctgtgcaaagggaagcgttctgctgaaacaaggaatggaaagccatacgacaatctgatcctgcaggataaaacggggacgctggacggcaaagtctgggaccctaattccagcggaatcgcagattacgacgagatggattttatagaagtatatggagaggtgatcagttataacaacaacctccagctcaatatcaagcagatccgcaaggcacaggaagacgagtatgtggcggcggactacatgcccaccagcgagaaaagcacggagggaatgtaccgggaactgcttggctatgtaagccagattgaaaatacctacctgcatcaggcggtagagtattatttcgtaaatgatgagacgttcatcaagacattcaaaggacactccgccgcaaagaccgtgcatcacggattcgcgggaggactgctggagcatacgctgagcgtggtaaagttctgcgaatacatggtaggcgcttatccgattctcaataaagacctgctgtacgcgtcagcgatctgccacgatatcggaaagaccaaggaactgtccaccttcccggaaaatgactatacggacgacggccagcttctgggccacatcatcatcggcgtggaaatgatgagcgacgcgattcgcaccatccccggcttcccggagaaactggccagcgagttgaagcactgtatcgtggctcatcacggcgaactggaatacggctctccgaaaaagccggcccttgcggaggctttggccctgaacttcgcggactgtacggacgcgaagatgcagaccctgacggagatcttcaaagacaagaacaccaatgactggctgggctacaaccgcctgttcgagtcaaacctgaggaagacgagtatataaaaagggacgtaacatttttcaaaagtgttacgtccccaattgcaagtagccctgtccccaattgacgaaatggagtatgtttatgcagaaaaatgaattggttacggttacgatcgaagatataggaattaacggagaaggcatcggaaaggtggatggatacacgctgttcattaaagacgccatcatcggcgacgtggtggaggccaaagtgatgaaggccaagaagaactacggctatgcaaggctgatgaatattcttacgccatctccataccgggtaaaacagccgaaatgcccgatggcccgcaaatgcggcggttgccagatccaggagatggagtatgaccgccagctggccttcaaagaagacaagatccgaggaaatcttatgcgtatcggggaggttccagcggaagtgctggatcaggcgctggagccgatcgtaggcatggacaacccatttcactaccggaacaaggcgcaatttccaatcggaacggacaatgaaggacacatcataaccggattctacgccggaaggacccatagtatcattccaaataccgattgcgcgctgggcgtggaagtaaacgaagtaatcctgaagcagatccttacatttatggaagagtataagatcagcgcttatgacgagacagagcataaaggcctggtgcgccatgtgctgatccggtacggattcgtcacgaaagagatcatggtctgccttgtaatcaacggaaatcatctgccccacggggaaatcctggcagagcgcctggcgaagatcgaaggaatgaccagcattacgctgagcatcaacaaagaaaagacgaacgttatcatgggcagcaagatcgagcccttgtgggggaaaacctacattacagactatatagcaaatgtaaagtatcagatctcgccgctgtccttttaccaggtaaatccggtccagacggagaaactgtatggactggcgcttgagtacgccgggcttaccggcaaagagacggtctgggacctctactgcggcatcggaaccatatccctattcctggcgcagaaggccaaggaagtctatggcgtggagatcgtgccccaggccatcgaggacgccaggaataacgccaagatcaatggaatcgagaatgcccggttctatgtgggcaaggcagaagaagtgctgccggagtattatgcgcagtacgagaaagagcatgggaggaatgcccacgcagacgtgatcgtagtggacccgccgaggaaaggatgcgaagaatcgctgctgcagaccatggtggatatggagccggagcggatcgtgtatgtgagctgcgactcggcgaccttggcccgggatgtgaagtccctgagggagaaggggtatgagctggttagagggagaggcgtggatcagtttgggcatacggtgcatgtggagacggttgcgctcttaatcccaaaacaagataaggatagtatgttcagtaattcaggaattgaaaaaaagttgtggaaagaaatctgcgatttggcaaagcaatatgatgtagatcgggtgattctttttggctcccgggcaaggggagactataaaaaggtaagcgacattgacttggctgtgtcagggggggatgttagtggcttttcgatttctgtagatgaggagacgagtactcttttgcagtatgatatagtgaatctggatggcagcgtacaggaagagttaagggaagccattaagaaggaagggaaggtgctgtatgaaaaagtttgataatttttgtctggcgttggaaaacttaaatgatgtttataattatgatgagccatatgaaaatgtggttttaacaggattggtggcattgtatgagatctgttttgagcagtcgtggaaggccatgaaagaaatattggaatacagcggctttgaagaaagtgcgacaggctccccaaggcaggtattgaaaacagcttataaagcagggctgataaaggatgaaaaagtgtggattgaggccctggcaagcagaaataatgtggcgcatgcttataataaggctattgcgttggatatcgtgaaggctgtgcgggatagatactatgggatgtttgaagagttgaaaaaagaagtagaaaagaagtggatatagattagaggttattggtggtgggaagagtggacttgatgtcaagattgagaaacagatatgtgaaatagtttagaataaggatcttcctaaagttggagtaaaaactcgggctttcttgaaacagtagaggttcccatgcatcaaaaataccagacagaaaaaaccaatacaaccatatcacctaccaacattaaaaaaatcaggagggaaattaaattgaaaaaaacccacaacatccttatcatcctcaccggaggtaccatctgctcattcgccgacaaggcaggcaagcgagactctgatgtagagagggcgcatacgttgatcgaaaggaatttcagagcctccggctcgcgttattcctccgaggaatgtgtgacatttgacaaagagaagccccttgacattctgagtgagaatatgactactggtaattggaacatccttatctctaagatgagaacgtatgactattcaaaatatgatggcgttattatcctgcacggtacggacacccttgcttatacaggagcgttgctttcgattctgatggcgggcactaagattcctgtgtttctggtctccagccaacttccgccggatgatgagaaggccaatggcaacgcgaacttcagggctgcggttgaactgatcatcaatgggatagagcctaatatttatgctgtgtatagaaatacggagaccgacggatccggggaaacacagcgtatgtatattcactattgttctcatctgctgcagtgcgccaaccgttctgagaatttttacagtccggatatggctgaggtaagccaggagaacgctgtttttgaggggaaatcctctggcggagagaggatgtacttgtatcacgactttgaactctcgccttgtgttcttcggatcattccttatgttgggatagattatgagcattactgcatgaagggggtcaaggcgattcttcatggcacctaccattcaagcacaatggcggtgactccatacaaggacgacgaatcgaagcggtacaccagtcaggccatactgtcgctcaaaaagcgatgtgatgagtgcaagcctccgatcccgctttttcttgagcattgccatagagacgcatacaattacatatctacaggaatcattttgaagtacggcgccataccggtatggacgatgacttctgagatgacttatgtaaaattgctggttggctgtgcgcttggttacgaaggggaaaaactgaatgaatttatgaatagagaaatcaacgatgaattcgtttatagagattagggtcgtatgaaagagtaagatttggagacactaggaaaagtatatttttggttgacttagccaggaatgtttgctagtataaaaatggagactcagtttttgtggaaattctaacagggagaacacgtcgtcgactggaagcgtgtttaagaagagtagtaagtttgggaacgctccatgtaattatcaacataaaatcagatatcaaaagaggaagctttcgcttcaaaacgggtggcaccgcgggttactttgtatactcgtcccgagaatacgtattatatattggatatgtattctcgggattttttattttaatttaggaggtagaaatcagatgtataggactctttactgtaatgatatccgtgaggagcatgttgggcagacggttcagcttgcgggctgggtagatgcgattcgtgaccacggaggagtaatctttgttgatattcgcgattatacgggcgtgacgcagacggtaatccataacgaagaattattgaaaaatgtgaatcgggaaacggtgatctctttaaaaggggttgtagaaaagcgtgacccggacacggtgaatgagaagatcgcgacaggtattgtcgaactggtggtaagcgagcttgtggttttaggcaaatcaaaaaatatgctgccttttgatgtcagcagttccagaaatattaaggatgaattacgccttaagtatcgttatcttgatcttcggaatcctaagaatcatgacaatcttgtgatgcgttccaagattatccgtcatttaaggaacaagatggaggaaaaggatttcctggagatccagacgccgattctgactgcgtcatctcctgaaggcgctcgtgacttcctggttccaagccgcaagcatccgggcaagttttatgcgcttcctcaggcgccgcagcagtttaagcagcttttaatggtttctggatttgacaaatattttcagatcgcgccttgcttccgtgacgaggatgcgagagcagaccgttccccgggtgagttttatcagctggactttgagatggcgtttgctacgcaggaagaagtcctgaatatttgtgaagacgtgatttatgatacatttgtaactttttcggataagaaggttacagaaaagcctttcaggcgtatcacttatgcggatgccatgatgacatacggctcggacaagccggacttaagaaatccgctattaatctgcgatttaaccgcatttttcgcggatgtagccttccctgcatttagaggaaagccggttcgcggtatcgtggctgattgtagaggcaaatcgaagaaattcttcgaagattcactgaaatacgcgatgtcagatgaagtggctcttggcggattgggatatattactctgaaagagggggcatttgcgggtcctatcgcaaaattcctgagtgatgaaaagaaagcggagattacctcccttaccaatatcaaagagggagagaccttgttctttatctgtgatgataagaagaatgatacagagaagaaggcaggcttgatccgtacctggctggcgaaaaaggaaaacttagatcttattagagatgacgcgtttgaattctgctttgttgtggatttcccgatgtacgagattgatgaggagacgggagagactatttttacgcataacccattctctatgccgcagggcggtatggatgctttgcttggcaaagatcctacagaagtgctggcataccagtatgacctggtatgtaatggaattgaactggcatccggcgccgttagaaatcatgacattgatattatgaagaaggcatttgaaatcgccggatatgatgagcaggaactgaaagagcgattcaatgcattgtacaccgcgttccaatacggtgcgccgccgcatgcgggcatggcgccgggcgttgatcgtatggtaatgcttcttacggatgaagaaaagattctggacgtcatagcattcccgttaaatggaaatgcgcaggatctgctgcttggcgcgccgagcgaagtaacgagccagcagcttgaggatgtccatctattagggaattccaacgctttggcaaaacatgctttcgcaggaagcggcgatggaaagtatgcgaaggggaaacgttctacattttccaatgcgcagcagctaaatcagatctctcttacagaggaagaggacacggaagtacaaggcatttttgaccggatgaagaaaaaggaagagattcttttgcaagtcgatacggaaaatgtcgaggaaatggttcatgtaatgcctatgaacaatgtattgcgtgaggatgtcagagaacaattgtttacaagagaaagtttacttgaaggcgcgcctatgcacaacgaaaatagttggcaggttccaagacttgtaaagtgaggtggatgatatggaatattatgcagcaaaaataaatgaaaacggcgccattgccgtggatgacagcattcttgtaaagggtgccgagtcaacgtatggctctaaaatcttgatgggattcaagcctttattcagcgctgaagcagtagagcgcctggagaagaatggttacctggtatccgggaaatgccatgtgggcgagttcgggctggatctggtgggcgaattctcccactatgcgcaggaagatacgaaactggaaggcgcggcggcagcgctggtagcaaaatccgatgtgaaagcagcgcttggagtggatgtaaatggcgcgccgagacgtgcggcggctcttgcaaatgtagatttcctcaagcccacctacggtacggtgtcgcgttatgggatcatttctacagcggcatctggcgagcaggtaggcgtatacgcgcctgacacccaaggcgtaaaagaagtgatgggtgtgattgcaggccacgatgataaagatggaacaagcctgaggacccagacctatgaatatcatacagacgaagatatcgctggcaaacgtgtctgcatcgtcaaagaattattagaaatcgcggatgcggacacgcaagaaaacgtgagagcgtttgccaaaaaacttacggataagggcgtgaccgtggaagaaatctcttgcgacttttttgagatggcgaatacggcatggcagattcttatgtccgcagaaacctgtaataatatatccaggtttgatggcgtaaaatatggacgccgtgcagagaattataaaaatattgatgaactgtatgtaaattccagaacagaagggtttaactttcttacaaaggcagttattttatatggttctgacgtactttccaagaaccggtataaggattgttatgataagtcgttaagaatccgccgtgtcgtggcggaaaagtttgcggcgctgatgaaagagtacgatgcggttcttacgcctgcctgcagcaaaacaagttacgagcgttatgatatttatgctgcctttgaaaaggtttatgaagaaagcatatttacctccgtggcaaatctgatcgggattcctgccctggttagccgcaaagttcagttaatgggcggacattttagcgaaagcattcttttaagtatggctggagccgttgaaaaggaaggtgaataagtatgaattatgaagttgtaatcgggcttgaaacgcacgttgaattaaaaaccgaatctaagatattctgctcctgcgggggccacgcggcggcgaagactccgaatgactgcgtgtgtccggcctgttccggcatgccgggcatgcttccggtaatgaataagcgagtggtagagcttgcggttcttgccggcttgatgttaaactgcgagatcagcagatatacgacatttgacaagaaaaactattattatccggatctgccctgcgcatatcaggtcacccagatcaatcatccgatctgtaccaatggctgcgtacaggtaaagacgtccgcaggcgtccgcgacattcacattaagcagatccatatggaagaggatgcaggaaagctggttcatagcggcagctactcttatgtggactttaaccgtaccagcgttccgcttattgagatcgtaacccagcctgattttagaagtgcggaggaagttatcacataccttacaaatttaaaatccatgttccgctttagcggcatttctgaatgtgaggaaggcgcgatgcgctgcgatgttaatatttcggttcgcgagaagggaagccaggagtttggcgtccgtacagagattaaaaatatgagttcttttgaatccattgaaaaggccatcaactatgaggcgcaaaggcatatggacgcgatcgagtatgaattagaagaattggttcaggaaacaagacgttatgatgacacaagcggcaagacctttgctatgcgtaacaaggaaacagaagcagattatcgttatttcccggatgccaatctgatgccgattattattgatgatgagtggattgaggagattaagaagaacaggcctgtggaaattaatgataaagtggtggaatatagcgaggctggcatatcggaaaaagaaatagatatgattatagccaatcaaaatatttcccagcttctggatggggttgtcgcgcttggatgtaacgccaaagatgcggcgtcttggattctcacagatagcgtaggcctcttgcgcaaagagggcaagaccatagatgagttatccatttcgccagaaaaattgtcggcaatcatcaaaatggtagatgcgggcgagatcaaccgcgtatccggcaaaaaaatcctgacggctgtacttaaagaagacgtagatccggttgcgtactgtaaggagaaaggttttgacaataaaatagatatggccgtggttgataaggtcatagatgaggcaatccaaaataatgcgcaggcagtagcggactataaaaatggcaaagccaaagcgatccagtctgtattcggcgcttgcatgcgcgaattgaaaggtatcgtcgagcctgcaattattaaagaaatgttagaaaacaagttgaaataatagagcctttccggcaacaaatggttgctggatcagacgataaaaagtggtgctggagtagtaactccggcaccacctttttcactttataggaaagttctcctttcggagaacttggggactaaaatagcccgctcaaaagcgggcatagtgaatcagacggtttggattaaaagatgtaaaagccctcttcaccaaaatcgtcatcatcaaggttatcaaattcatgtaagaaataatccatatccagaagttcgtcgtcactcatgtcatggacttctttagaagtcataccttctggtggatttttaatgtactgttcccttagttcctttgcgagctctgcttctgttatacgtttcatagtgtggcctccgttcttaagatatattgagtttatcatgagaaaagaggttttggaagatatgaaaacgaggcaggcgaacgacatctatgtttttgcatagccttttcgtataattcatgcaaaggaacaggattatgattaaaatatagttctaaaaatagcatggtttttccacagttcggacattttaaaggatcgtaaccaaaagaatgtaagattgaatcacgccacctattgagtgaaagaaaaaagttatgtttttctctggaaatggcttttcgtaaaaaattgtcagaattacggtgacgagcgtaaataccataatagcgaatcattttaaaatgtttttcagggatgtgttgtgttaagcggtcaatgaattccaaaacaggaacagtttctgtaataagtttattgtcttcatgacggttgtaatggaaggtgacaaaatcaccatcgtaagaatcaatgcgagaagtagcaataacaggtctgccaagataacgaccgatatatttgataacctgagaaggattacacttgttaggcatggcgcgaacataaaaaccatttttatcttttgcatagatagcagattttacttttttgaaagctggacctattttttgatggagttcatttaaaagagcagtttggaacgcatcacgtaaaaaatgatagttaaaatgtttgaagtgtcgccaggaaagagtattaccaacaccaccttcagaaacaaggcagtgaatgtgaggattccattttaaatctctgccaaaggtatgaaggacgcaaataaatccaggagtaaataatacagatttattttctttatggaacatacgagaaatcacgctgttgactgccgaaaaaaggcagttaagaagagaacggtctttaagaaaaaaaggccgcaaagaatcatcaatggtaaaaacacaatgccgatgttgtacatcaataatcttaaaagacatagcagtagttctgtcaatggaatacatgttaccacaagttggacagaagcgagaatgacaacgaaaagcagtaaatttgaaattaccacaattgggacaaatatacatggcgccaccataagatggatcgccacaatgaatcattttttctacattctcaacaatagcatcacgaggatgttgaagataaatcatttcttcataatgttcgataaaaattttttgtaagatattcataagaccattatgaagcaaaatgaagcaaaaagaaacccctatccctcatgattgaggggcaggggagttgaagtgtcgaagacactatttttacttatgcctccacgaccagcggcaccacggctcccttttcaacatcaaccaatccgcagtctgtcaatttgagcgcgggacttactggaagtcccaatgtgcacaatgacatgatcggattataatgacggtaacccaatgtttccaggctttcttttacgccgcccagcatccggccaatgtcgtccgcgggcagttctgacaggattccgcacacaggaagcgggagttcggccacaatgtgtccgtgctctacagtacagattccgccctgtaattcgatcagccgtctggtagcagttaccatgtcgtccacatttgacccgatcaccataaggttatggtggtcatgatagtaggtggttgccgcggctccctgcttcaggcagtcgccagttacaaagccatagccgatattgccgttttttccatggcgttccagtacggcagccagcatgcagccgctgtcctgccattttaatctgccattctccacatccatggctaccagtttttccctggtctgcgtacggccgtctgttacttcgatcacgcggacctgtacttgcttctgatcggtggagaccataggttccagatccgtggcctcgatctggtccagatgtacggagtggtagaattcctccggaaaatggtaagcgtttaacgtgtgtctggctttccccttccagaagatttccttgccatccttgaacacagcctcaggctcaaacctatggagttcagtttctttcaccagctggaaatcggctttccttcccggtgccagagtgcctcgatctcttaggttcatgcgccttgcgggagtataggacgcgcagtaaatggcctgcgtaagcgggaatcccatttcaaccgcttttcttacgatataattgagctgtcctttttccagcagcgcgtctgccatggtgtcgtcggtgacgaagcagcagtgttcatagagccggttctcggtgatatattccagtatctcaggcttcagcattttttcctggatttccacaaacattccattggcgaaccgctgccggatctcttccagggagtgctcggtatggtcgccgtcgatcccctgatagaggaatttcgcaagatccaggcccaccagagagggacaatgtccttcgatgactgcctggggatcttcttcccggaggtaacggaggaatttggtgatctccatctcagtgccctttacgatctggcggtagttcatgacttctcccacgcagacgacgccgtcttcctgcatcagatgcttcatctcatcaaagccgatgattcccccggtggtctccagatcttcgttggtcgaaggaacgctgcttgggattccgtaatagatgtcaatgggggagtctttcgccccgttgatcatctcatggattccctgcacgcccatgacgttcgcgatctcgtggggctcggaaaccagcgtagtgactccgcaggaggccgcccgctctccgaaggaagcaggggtcatcatagaactttctatatgcatgtggatatcgataaagcctgggagcatgtaatatccgctgccgtcaattacctttttggcgttgatattaccttcctgagccgtatccacaaaatagatcctttcccccagtatatacacatcagcaggcgtaaacactttcagataggagttatacagtttcgtattcttgactaatagatctacgttctccacttggcacctccttcctacagaatggaataaaagtaaagcaggcagacggccaccagaatccacatgaccggacggatttcttttattttgccggctgagatcttcatgatcacataggtgggcagtgcggcacagatgccgtttgcaatgttatttccgaaaatggtaaacacgatgcacacataagccgggaaggcttcggtgagatcgttgaatttgatgttccgcattgcccccagcatattgatgccgatgtacatcagcaccggcgcggtggcggccgatgggatcatcagggcgatcggcgcaaggatcagggcaagtccgaagaagatggaagtaaacacgacggtcagtccggtcttgccgcctgcctccacgccagcggaagattccagataggtcgtcatgctgggcatgccgaataatgcgccaaaactggtagccacagcgtccaccttgaagcatttgtcgattcccggaagattgccgtcttcatccagatatccggccttcgccccaacgccaagaacggttccaaaggtggagaaaaagtccggaacgaataaggcgatcaaaaatggaatataggcaaagtttaatgcgcccagaaagtcaacatgtaaaaactggccgcctatatttgcaggcatggtaaacaggctctccggcatctttgtgacgccgaatgggatgccaaccagcgtagtgagggcgattgccagaatcatatctcctggcacgcttcttgtcttcaggatcagcaaaattacgaatccgatgacagcgacgatcaccgtaggcgcggtcagatcgccgaatcccagactttttttcgcttcgtttgcgacgatcaggccgcagttttttgcgcccagcagcgcgataaacaggccgataccggcacttacggcgtgctttaggctgacggggattactcttactacagcctcccgaaggcctaaaaaggagattacgataaataatacgccgctccaaaagataacgccggccgccacatccggtgcaatgccgtcattggcgatcatagcggttacgattcctacgctgccaagtcccggcgccagcgcaaatggacggttcgtatagaatgccatggcgcaggtcgtaaggattacgagcagaatcagcacggtaaacatgacgtgcttgtctaatcctgcggactccatcatattcggtactgttgccagcacgtaggccattgttacaaaggtagtcaggccggccagaagttctgtcctgacatttgaatgaaactctgacaatttaaactgtctttccaaccactgtttcatatagattgttcctgcctttctctggagtgcgtctagaaaggcgcgcactctgttgtattttcttgattctttcctttttacattgtatgataaccatagcggtaagtctaattcatgttaatcatcaatcctattccattttggaatagcccggagggaacttatgaacatacacgagttgaactatgtactctgcatagccaagcatcagaatatgacgaaggcggcccgggaactgtatatctcccagccgacgctgagcaagcacctggggaaacttgagcgggaactgggaatcaagctttttaaccgggtggacaattgctatatcccgacttacgcgggcaggcgttatatggaatatgccagccgcgttctggaactgacccggaattgggagaaggagctggaggacctccggtccttgaatgacggcgaactgaatgtggcattcccactgatgcgaagttcctgcatgattccctggattctccccgcattccgccagctgcatccgaatatccgcctgaattttctggaggagacttatgccatccaggaacgcctgttaaatgacggccggatcgactttgccattttcagcggaggcgacccgaaccccaagctggaatacgaggtgctggggcaggaagagatcctgctggccgtgtcggcggacaatcccctggcaaaggatgctgcctgtgatcttttaaaagagggcggctatccgcccgtggactggtcaaagcttcataacgagaagttcatcctgcaccatccggagcagaatacgggagcgatcaccggacatcttctgaaaaaacacggaatcacgcccactgtgccattctatacgcgcaatacgcaggcggcgcttcttctggtccagcaaaatgaggggatttgctttgcgccggaaacctatatccgcaacatgacgtttcatacgccgccggtctgcttttccttaaacgatcccgaagcgttcgccaccaccatgatcacctatcggaaaggggcgtatctgtcggcgtatgcgcaggattttattcggatagcgaaggagtattttaaggggacctcgttatgactagagacaatttaaaagagtcttagtattaataaaatattatatggattagtaaagcagataaatgatctgaaaggatgaggattatgggtggaagagatgcttcaaggggttttttataccagggatttgcgtccgtattagaggcgttaactaataaaaataagtgggacaagatttatgttgagttccctacaacagatgataaggtagatatagcattaggactacaaaatcaaattgttaaatgcatacaagtaaaatccacgataaatacgtttgctaaatctgatatcaagacatgtatcacggatattataaaggatatggaaagtccggaatatgaattattcttaattgggcagtgtgataagtccgccaatacatttataaagtcaattgataagtattatgaaggagtgattgataaagaagcagaatcttcgttaagtggttttgatacagagttgcttgataataagaaaataaggttttctatcttgccatttgatatagatatattagaaaagatagttagagattctttgcaccagtatatttcatctaacaaacaaatgatgacgtttgatcaaattaggtttattgcttcgactactgtgaatgaccagatgatatcttcaacacatggcagaggtgttgacagaaaagaatttgatgaggaaatggaaaagcgtattcttcttgttgctgataagtattcccctaaaagaatacctatcggtgtaaaaagttttacccgagcagtagggcgtttagaagaagatgtagataagtgcttatcatttgttgataagtttgctgaccggaagttaaaagatgaatatgattggaacggagatatatacagaaatttgaaagaatttctgctgacaaatacaagcaacaggcatgcctatcagattttaatggatgcgcatatatccatagccttcgctgcaggaagaattcttgatagtaaatcaggcgttaatatattcccagtacaaaaatcttcaactaatggcactgtattatgggatgtgaaattgtcgtctaaaaaagactatgcgaaatgggaaatattgcatgaaaagtttaatgagaatcaatatgattcggcgttagtattaaacgtctctcgtgatatttataatgatgtggtaaaattcataaaagaaagagatttgtccattgggcgtatcattaattgcaagttaaacggagtagaagctacaaatttttctatagaagatggaacacatgccactattttagctaattcagtttatagcgctattggcaaaagaagtattatggaacggcgtgcaacactgcatatttttgcttctgcaccaactgcatttatgttttccctggggcaaaattcgtctggatttggcaaatgcattctatatgagtacgattttgaactaaagaattcttgtacgtattcgcagtcaattagttttactaattaaaaaaggattgtttctgtctattataccgttagattatattggagaattgcaaaggagaatgcacctcatgtattacgcaacagactatatatcgcccctgggccgtgtcaaactcaccgctgatggcgaagccctgataggcctgtggctggaaggacaaaagtactttggcgggaaagtcaaagaagaattcgtggagaatagaagcctcccggttctggaaaatgcgaaggactggctggaccggtattttgcggggaagaagccggagatatccgaactgccgcttgcgccgatgggaagcgcattccagcaaggcgtatgggaacttctctgcgagattccctatgggcaggttaccacttatggggagatcgcgaaaaaaatggcagcgaggatgggaaaaagcagcatgtccggccaggcggtcggaggggcggtcggccataatccgatctctatcattatcccctgccaccgggttgtaggcgcgaacgggagcctgaccgggtatgcaggcggaattaagaaaaaggtaaaactgctggagcacgaaggcgtggatctgcagaaattttttatacccaaagagggaacggcactataatttatagcagaccagtatagaatagcaggaaggaggaagagagcatggggatttggacagaaaagcactagctgcaaggcgttagtgtttcgtacgccttgctgatcaggaagttaagagacagaccaatgattaggaggcaaacgatgtcatatttttattatcagtcaaaaaggatttattacaccgaatctggaaatggagcacccgtattattcttgcatggcaatactgcatcttccaaaatgtttgaactattactgcccttatatgaggaacggttccatgtgattctcattgatttcctggggcatggaagatcagaacgcttggagaggtttccggcggatctctggatggaggaggccagacagaccactgcgctgcttgagtatcttaaactgggaaagataagtctggtaggaaccagcggaggcgcgtgggcggcaatcaatgctgccttggagcggccggacctggttggcaaagtagtggcggacagttttgacggccggacgctggcggatgatttcgcaaggaatcttgtcctggaacgggcaagcgccaagcaggacgagatgggagtcggattctatgagtggtgccagggagacgactgggagcgcgtggttgacatggacacagaagccatgatccagtgcgctgaaaagaaactgccgttattcattaagccgttgaatggattaaaggtaccgcttcttcttatgggcagcgaggaggacgagatgtgcaggaaggattttctggaagagtatgatgcaattgcaaaagaaaccggcgcgcagattcagatatttcctaccgggaatcatccggcgcttctttccaatgcagagcgggcggcggaagccattggcagatttcttaaatagtatgaattaagagaagggatggaacatttggatgtttcatcctttttgcggttataggaaaagcaaaacagtaatattgacatacaatggttttggtgctatgttttaggtaattcgaaggaggggaggaagaaagatggggcataagctgaaagtaattcttacagtcatcttaattgcaagtttgggcatttttctatcttccggtcttcaattctacgacgcaggtgatgacttaggcagttcttcaggacaggaaaggcagggcacgttaacccaggcagattatacggacggcaatggcatgcatgtcttagacggaggctgtataagcacggaaaaagagacagaagcggtctgttcgcagatattccagggcttgaagaatattcagaggctgccagtctggttttacgcatttatcctactctctatatgcatctggcagaagagggcatttttgtcatatctgcaattctatttatttcctttggcacgattcttgtgcgaactgtgtatccgattagaaaaagacgggaagaaacgggactttgctttctaactcttatatttatagaaagaaagcagggaagaaatgaagaataaaaaattaaatatttggattgctcttggggtaatctttctttttgtgtacctcgcagtcttcggctgtgggggcggcatcaagggaatgcgcgacatgcgctttggcatagatatccgaggcggcgtggaggccgtattcgagccggcaggaacgaaggaaaaaccgacaaaggcagaactggaaatggcaagggaagtcatcgagacccggctggatgcccagaatattctggaccgggaggtgacggtggatgaaaaggcaggcaacatcatcgtcagattcccatggaaatccgatgaaaaggactttgacccggaaaccgccatccaggaattaggccagatggcagagttaacgttccgtgggcctgacggcaccgtgtatgtgaaaggctcggatgtagccagaagccgggcggcgctggatgagcagaagagaaacatcgtggaactggagtttaccggcaagggtgcggaaaaatttgccaatgccacggaggaactggcaggacagaatatgggaatctacatggatgaggagatgatttccaatccgctggtgaatgggaagatcacaggcgggaaggctgagatcacagggatggcctccaaggaggagagccaggatctcgcggataagattaattccggggcgctgccgttctccatggagacgacgaattacaataccatcagtcctacgcttggagaccgggcgctgaatgcgatggcggcagcggcagggatcacgatggttctgatctgcctctttatggttgcgtggtaccggcttccgggcatcatcagctgcctgacgctggcctttcagatcgcgttgcagatcctggccatctcggtgccgcagtatacgatcacccttccgggcatcgcagggctgatcctgtcgggaggcatggctgtagacgccaacatcattatcagtgagaggatcagcgaggaattgaagaaagggagttccgtgaaacgagcgataaagagcgggtaccaaagggcattttcttctgttctggacggaaatatcacgacggcggctgtggcgggcattttgatgatatttggctctggcacgatgctaagcttcggatatacgctgctgaccggcgtgatcatcaatctgctggcaggcgtgtggatgtccagaagcatgctgaattctgtaatccggtacggcttttttaaccaggggaagtggttttgcaaaaagcgtgataagaaggtgctgcactttactgaggcaaagcggtatttctttttggcaagtattgctgttattgtctctggaaccatatggagcgcggcaaatggcgtgaagctggatacccagtttactggaggcgtcattttaaaatatacctactccgggaaggcggataccggacagatacaacagaaagtggaggatatcgcagacagaagcgtcagcgtccagacatcggaagatccctctacaggggagaagaaactggtactgacgctggcgggaaagaacgggctgtctccggatcagcagaagcagattctcaatacgctgaataaaggaaatgataaccggtttcagacttccgagacgtatgcggtggaaccctatatcggagcaaaggcactgaagaattccgtcatagcgatcatactttcttttctttttattattgtatatatccgcctgcgcttttctgcacttggaggactggcagccggggttacggcggttctggcgcttatgcatgatatctgcatcgtgctgttcgtattcgggatattccggataccgctgaatgatgcgtttgtggcagtgacgctgacgattatcgggtattccatcaatgataccatcgtattgtatgatcggatccgcgagcacaggaatacgatgaaaaggaaaggaactctggcggaactggtggatcttagcacgacggaaactctgggacggtcgatcaacacggcatttaccgtaatcctatgtgcatttattattctggctgcctcgatcgtctaccagatggagtctatcacgaagttctccctcccgcttcttgcggggctggtatcgggatgctattcgtcaatctgcatcgccgcgcctctgtgggtatggtgggaagaacaggttcaaaagcggaagacagggatgaaaaggaaatgaagaatataaaattattttttagaaatcagccgccggggcggctcattgcatcgggattcgcgcttgtaatcctgctgggagcattcctgcttttgcttccagttaccataaaagacggagcagaagtatctgtgatcgatgcgctctttacttccaccagcgctgtctgcgtgactggactgatcgcgacggatattgcggatcattttaccgtattcgggcaggcggtggtggcgatcctgatccaggtcggaggcctgggcgtcacatcgatcggcgtaggcctggtactggcggcaggcaagcgggttggcattaagagcagggtgctggtcaaggaagcgctgaacgtggatacatacaaaggaatcgtaaggctggtgaaggcagtactcatgatgaccctgtgctttgaggcgggaggggcgcttcttagcttcctggtattcagccaggattacgcgccgctgcatgcggcgggaatcagcatcttccattctatcgccgcttttaataactcgggattcgacattctgggagggctgcaaaacctgatcccctatcaggatgacgttctgctgaatctgacgacttgtacgttgatcatttttggaggcttgggctttctggtgattctggacgtattaaagcggagacggtttcgcaggctggccctgcactcgaaagtagtgatcgcgaccagcctggctttgctggctgtcggaacggtctcattgaaggctacggaagatattacatggctgggcgccttcttccagagcgtttccgcaaggacggcgggattctccacgtacccgatcggacagtttaccaatgcgggcttattcgtcctgtgcgtgctgatgttcatcggcgcgtcgcccggctctaccggaggcggcatcaagaccagtaccttcttcgtgatattccaggagatacggggcatgtgcgcgaagaagacggtccacgccttccaccggagtatctccagacagaatgtttcaaaggcgtttatgatcacgattctctctggcacggtcgtaggcattgcggtatttttgatgtgcattctggaaccagatttcagtttcatgcagatcttctttgaagtgatctccgcgtttggaacggtggggctttctaccggaattacgccggatctaagcgtggcagggaagactgtgctcatcctggtcatgtttacgggaagagtcggggcgttcaccctgctgtctatgtgggtgaaccgggcggagccgaatgccaggtattcagaagaaacaatatcagtgggataattaatgaggtgaatgaatatgagaaaaaaagaagaaactgcatatggagtcattggacttgggcgatttggagaggccttggcaatcatgctggcgcagtccggaaaagaggttatcgtggtagaccgggatgagagtaagattaaggaaatgcgccaatacacggaatgtgctttcgtgaccgagaacctaagcgcggaaaccttaaaagagatcggcatacagaactgcgacgtggttattatctgcatcggcgagaaagcggatgtcagcatattgatcaccatgagcgtgattgagatgggagtgccaagagtgatcgcgaaggcgttcagcccagaacagggagcggtattggaaaagatcggggcagaggtggtctatccggagagggatatggcgctgcggcttggaaaaaggctgctgtcaaatagttttattgattttgtctctttgtgcgacagcgttgagatccgccagctgcaggcgccggagagtctgctggggcgtacggtggaagagacgcagatgcgccgcaaataccgcctcaatattatcgccatcgtaagcggagaccatacagagatcgaggttatgccagattaccgcctcaagcagggagatatcatcgtggtaatcgggaaagcagaaaatattgatacatttgtcaacataatttaatgggaaaggaaggtattttatgagaaagacgaagattgtctgcacgctgggaccggccacggatgaggggaacgtgctggagcagctgattcaggaagggatggatgttgccaggtttaatttttcgcatggcacgcatgaggagcagaaggcgcggctggaccggttaaaggaattgagaacgaagtatgacaggcccatcgcggcgatgctggatactaagggaccggagattcggattggctgttttaaagagggagaggcggttcttgaagaaggacagatatttacgctggtatcccggaatgtggaaggaaccagggactatgtctcaattacttacaaggaactttataaggatgtgagcccgggagataccatattgatcgatgacgggctgatcgagatggaagtgaaggaaatctcaggggaggacatcgcgtgcctggtgaggaatggaggaaggctgtctgatcagaagggagtcaatataccggggactgagttgaacatggagtttctcagcaaaaaggaccgggcggatctgctgtttggaattcaggaggactttgactttgtagccgcctcatttacccgcactgctgaagacatccgcgagatgcgcctgcttctggatgagaatggcggcagggacatcaatattattgcgaagatcgagaaccagcaaggggtggaccacattgatgagattatagaggcggcggacggcatcatgatcgcccgaggcgatatgggcgtggagatcccgctggagcgtgttccggtcatccagcagacgatcatcagaaaggtatactgtgctggaaagcaggtgataacggcaacccagatgctggattctatgatggagcatccgagacccacccgggcggagacctccgatatcgcgaatgcaatatatcaggggaccagcgccatcatgctgtccggggagacggcagcaggaaagtatccggtcagggcgcttcagaccatggtaagggtggcatcttatatggagcagaatatcaattacaatgagatatttaagaagcgggaccgggcggaagacccggatattaccaatgcgatctcccatgccacctgcatgaccgcgatggatctgaaagccaatatcattctggcagccagcgaaaccggatttacggcccgcatgatctccaagtaccgtccgggctgcatgatcggggggtgctccagttcccggaaggtatgccgccagctcaatatgtcctggggaatctatcccctctataccaaggaggaatacagttcggagattctgtgcctgcgggcaatggaggcggcaaaacgccacgggctcgtagaagatggggataagatcgtatttacaggcggagtgccgcttggaattccgggaaagacgaatctgatccgggtctgcatcgtgggagagtagaagaaggcttaagccttgcgtatttataactggcaattccgtctcaaaacaagtataattgtaccatacgatatccgcgggcgtgcaggaggcccgcggcaccaaggaggaacgatttcatgaagatagaaatgggagaatcattattctcttcctggcttcgccatgaagaggagttggagcggctgatgaagcttgtggacgggcatttccatacccaatatcgatatagcattttcaagcagaacagttctcttgtacagatcatccagcagggagagtgcgaccttcggtggatcaaaagccatcaggaataggggagccgcagaactatgacaatacagcagttaagatatgtgataaaaatcgtagagtgcggctcgatcacggaagcggcgcggcagctctttatatcccagcccagcctttcggcggcagtgaaggaattggagacggaactagggattgagatcttccaccggacaacccggggaatcacgctgtctgccgacggtacggaattcctgtcctatgcccggcagatcctggagcagacccagctgctggaacagcggtatctgaataagaagccctccaagcagctgtgctcggtatccacccagcactacgcctttgcggtcaatgctttcgtcaacctgatatccggtattgatgccaacgagtatgagtttacgctgcgggagaccaggacctatgagatcatagaggacgtggcgaacttcagaagcgagatcggaatcatctatttcagcggctttaatgaaagagtcatgcagaaactcttgaaagagaaccatctgatattccatccgctcttcgaagccagtcctcatgtattcatcagttcttcccatcctcttgcaggggaggaatccgtcactctggaggatctggatgattaccctttcctggcatttgagcagggcacctataattccttctatttttcggaagagattctcagtacagcgccccacaagaagacgattcatgtcagcgacagggctactttgttcaatctgctgatcggcctcaatggatataccatctgttcaggggtgctcaacagcaacctgaacggcgacaatatcgtttccgtgaaactggaaacgaacgagtggatgcgggttggctttatctgcggcaataaggtccacttaagttccatggcccggggctatattgcggaactaaagaaactgattgcggaaaatggattcactcttctgtcataagacagccgctatgcagccagcaattggtggatggcttcatagattctggcggctatgtacgggttattcatggtatagaggtggatgccgtcaaccccatgagtgatcagatccacgatctggtctatcgcgtaagcgatgcctgcgtcgcgcatggcatccggattatgctcgtagcgttccatcatggctgagaacttgtggggaagggtgacgccgcacaaagagaccatccgttcaatctgctttttattggtcaccggcatgatccctgcttcgatgggaacctggatgcctgccagggaagcccgctcacggaagcggtaaaaataatggttgtcaaagaacagctgagtgatcagatggcttgcgcctgcatcgactttcgtcttcagattcttgatatcgtcgaagatatccgcagattcctggtggccttccggatagcaggcacccaggacattgaagtctccatgctctttgataaaggcgatcagatcgctggcatgacggaagtctccaggcacatagccgcatgaaggcacatcgccccggagagccaggatgttctcgatgcctgcctccttgaaatcggacagctggcggcgtacatcggattttgtcaggctgatgcagggcagatgagccacgctttctatgccgtattcatttttgatccgggaggcaatctccaaggtcgccttgcagttctcgctgccgccagcgccgtaggtgacgctgataaaatcaggatttaagtctttcaggctgtctatagtcttgtagatcgtatcaacaggattcgtccgctttgggggaaatacttcaaaggagaggacagatttattctggaaaagttcggttgtcttcatatcagttattcctttcgtctgtgttgaaacatataatatcaaagaattttaagataggaaaatataaaaaaattatcggttgacataggaaaagactataacccttgaagaaatcagggacatgtgagattatgagatatagagaaagaactggcaagaaacttgtgggaagaggtagaacgtggataagaaaggtaagaaatcagagcatataatcaaagaagtataccccgattccattgcagaagagatggagattgagtccggggatgtgcttcttgcgattaacggtacttcgatacaggacgtatttgactatagatatctgatcaaaaatgaatacatcgaggtgctgatccgaaagccggacggggaggaatggctgctggagattgacaaggactatgatgaggatcttggattggaattcgacaatggtctgatgagcgaataccgcacctgcagcaacaagtgcatcttctgctttatcgaccagatgccgccaggcatgcgagagaccttgtattttaaggacgatgattccaggctttcattcctccaggggaattatatcacgcttacgaatatgaagatgaaggatatccagcgtattgtcaagatgcatctggcgccgatcaacatatccatccagtccaccaatccagaacttcgctgtaagatgctgcacaaccgttttgccggggagaagcttcagtttctggatgtcttatatgagaatcatatcgagatgaatggacaggtggtagcgtgcaagaacgtaaatgacgggccggagttagagcggacgattgacgatctgtcccggtatcttccctttatgaggagcgtatccgtagttccggcgggaatcaccaagtatagggacgggcttttccctctggaactgtacgacaaagaggaggcgggcgcggtcatagacatgatcgagagccggcagcagagatattatgaggaatacggccttcatttcatccatgccagcgatgagtggtatatcacagcacagagagagttccccgaagaagagcggtacgacggatatatccaattggaaaacggggtgggcatgatgcgcatgttcatcaatgaattccaggaagaattggaagaagtccttgcgaaggaggcatatccggaaataaaagaaagcctgaagcggacgatcacgattgccacaggaaaactggcatttccgacggtcagggatttcgcccggcagctgatggaagcgtttccgggacttacgattcatgtatatgccattcggaatcatttcttcggagagacgattaccgtctccggattgatcaccggacaagacttggtgacgcagttaaaggagcagaaagagcatggcgaggatttgggagatacgctgctgataccatccaatatgctaagaagcggcgagcaggtattcctggatgacctgacggtggaagacgtagaagcggcacttgagatgaaactgacggcggtggaaactgggggcagggaattcattgatgccattctctatccagattatgagatggataggaacaatgaaaactttgtctatatccaggcatatgataaagctggacaataaccggatcatgaaacaatagagttgttggaaaagaggcgggatattcctgcattctgatcaaccagttcggggagggcgcattgccgatcgtagtagttgtggaagtgggtttaccatttataagttcgtaaagtgtctgcagaaacgttttggaatgattgagggtagcttgatgtgacggttaatcatattagcagatagagtgagtaaatgccttgtgtggttcgattgaggcgaactgtgcaaggtgtttcttttttggctgattatatcacatatacttatttggatattcaatatgttttatcaaatatgtgaattaacgattggcattccatgtacatttatgggactattagaccataagagtaactacaacagcaaaggagaatagcaaatgaataagaaggcaatcagtatcctgttgtgtttcggaatgtgtataacgatgcttgcaggatgtaatcaaaaggattcttcgaaagaaaccgaggaacagtcaagtaaagatgaaaaagtgatcaaagtaggatgtgaagcgacaacacctgggtggattcagactgataaaaagggtgagttatctggttatgattatgatgtatggacagaaatcggtgaaagaacagggtataagattgaatataagatcatggaatgggatgggatgtggtctatgtttgatgatggaagattggattccataggagaacagatctcttatacgacggagagggcccagaaatataacatgtcagagccatatgcatacaatatttattctttgctgtgtgcaaaggataacggagaactacagtccatggatgatctaaaagatggcatgacaattgcatgtgaatctaataccagtgatgagattgtgctaaaggctattgaagatgaatacggtgtaacactaaagccaacctattttgatggaatgtctgtacaggaggttgcccttggaagatgtgacttatggccgagagcgaggacttcttgtgaaacaacgattgaggaagttgataatcttaaaatattaggagacaccaaccgtgtagaaacaaatatttatccatttgccaagacggatgaaggaaaagaattatgcggtatggtttcgaaaacaattaaagagatgaaggctgatggaacattaaagaagttatcagagaaatggtttgatacggatattactgttcagcctgagaatacggaagttctggagtaattaaagaggggaaacgcgactatggattgggtatttacaggtgatttactggaagctatgatgaaagcccttccagtaacattatctttgacggggatttcgtttacattagcattggtattggcaattttaattgctatagtagaatattttaaagtaccaattttggataggatattttcattgtatgtttccttttttcgtggcacacctttgattccgcaattgtttcttctatattttggaattcctacgtttgtaccggcattaaggaatgtatcagcatactctgtttgtgttgtgggtttgacgttaaattcagcggcatatatgaaagaagtggtcagaggatcacttctttctgttccagaagggcaaaaagaggcggcattagcgcatggaatgtcttcaatgcagacaatgttccggatcgttctgcctcaggcggcaagggtggcaattccatcattatttaacaatcttgttgatattgttaagggcacatcaatggcatttactataggagtaattgaaatcacagcagcggcaaatttaagagcggcagtaacatttaattattttgaagcatatatggttcttatgctcttatattgggttatcatcctgattcttgaaagatttgaaactgtaatagaaaaatattttgaaaagacacgcacgagataggaagattaaaaagaatggattgcaaagaaaaaatggatacgacaaatacgaagcatatggtagaaattagagatcttcataagcggtttggcgatttggaggttttacgggggattaatcttaacataaaaaagggagaggttgttgcaattataggctcatcaggttctggcaaatcaacactgcttagatgtctgaactatctggaaaaaccggataaaggaagaattacgattggagatatagcaatagatgcagaaaagtgtacaaaaaaagaagttcaaaggcttaggaaacactcggcaatgatttttcagagttataatctattcttgaataaggatgtgttgcataatgtgatggagcctttgatttcttcgttaaggatgaatggagaagatgccagaaaaagggcactgtattatcttgagcaggttggtatgggcggtaagacgaaacaatatcccgcaacactttctggaggtcaacaacaacgagtcgcaattgcgcgctctcttgcagttctgccaaacattttactgttggatgagcctacctcagcattagatccggaatgggtgcaagaggttctggaagtgattagagatttggcatccaaacactttacaatgattatcgtaacgcatgaaatgacatttgctaaggaggtagcaaatcggattgtctttatggacaatggaattatagttgaagaaggtacaccggaagagatctttagacatccaaagaacttaagaacaaaagatttcttaaagttaagtaagccagatgagtttacaattattcattccatgcagtttgaagcaatgctgccaatgtttattcgtacgggattagaatatagcctggaggaaaaggcgccagagggcttattgacttgtattgaagttattgaaagagagacagggaatcgtgttggtggtgctgcactggcatatgcacatgatgtgtttattataaaggcggttgccatagagcaggcatatcaaggaaagggacttggaacaatggtggtaaaggatgcgatcaaggaggcgcaaggcagaggggctgtgaagatattccttgttgcaaaagtacccgaattctataaaaagcttgggtttcaagtagttgaccaacaaagtgcatcagatatatctacctgttatttgtgttcgagatatcacaatggttgtgattcggagattatgatgaaagagatataggtatcaatcaatgaggaactcactgcatttttccgggagtgtgacaaagtaccggcacgcaaaaacaaccttcaggatgcatgccggagccttgccgtgccattcttatcgcataaactgattgattacatgaagcacgccgtcttcgtcgttggactttgtgacaaaatccgccttttccaatacggcaggctgtgcattggccatggcgacgccaagtccggccgtctcgatcattgtgatatcgttgtatccatcgccgcagcagatcatctcatccgccgtaaggccgctgctggtcaaaaggcggagaagcgaatgggccttatcgatgccagaaggcatgatctccagaaagaacggatcggagcagtatacgcttaagtaagagcgaaaacgggcgatgatcttcttctgaatcttgcttatgacagcagaatcgccggtaatcaggaacttgttcggcgcttctttgatatgagaaaggaagtcgtcaacccggataatgggcatatggttgatgcgcgattccagttccgtatacttattagggcagatgccggagatcagggcgtccggcgtataggtgacaagatccagcccctgatccttatattccaagaccatgtcatatatgggcttggcgcagtccatcgggagcgtcttgttgtatatgatttctttggtctggcagttggtaatgcgccctccgttgaaggagagaatgtaactgccgtaatccccaaggcgaagctgctcggcaagaggggccacgccattggtggggcgtccgctcgccagaactactttctttccctgttcttgtatttcgatcaatgcctttaatgtcggctctgatatctctttgcttgagttggtaagtgttccgtccagatccagtgccagaatctgataattcataattgtactcctgtaatatctttatctgtatattttggttctatatatttttcagcgcttccacgatcgttgtcagatccatgccatgggaggctttgaccagtacgttgtcgccgtctttaatgagatctttcatggcatccagaaagtccgccttgttctcgaaccaaagtccccgggtagaggaagaaccgtttgtggcgccgtctaccagttcctttgccaggtggccgatcccgcataccaggtcgatgccgtgggcagcagcgtattcgcctacttcccggtgaagtactttctcgttatttccaagttcgcccatgttgccaaggactgcaacttttcgtccgatggccatatccagaacgtcgatagcggccttcatggataccggattggcattgtagcagtcgtccaggatgatcaggcgatccgtcttgatgatgttgttgcgtcccgggatggaaggcagcccttcgattccggccttgatctcttcggaagtcagatgaagggtatagcctactgccgcgcctgccaatgcattggagatcatgtgggtgcctggcaggggaacgacgcattcaaaggaggattcatccggcagatggatcgtgcaggaggttcctctaagccccatgggctggatattgtcagcatagaactggcagttatctccaagtccgaaaagtataggagtggcgcctttgattgggccagcctgcgagagaaggtcatcgtctccgttaaatatgatggttccgccatccttcatatcctgaatcatcttcgacttctcctggagaatgccttcgcgggtcttgaagaattccaggtgcgcaacgccgatattggtaatgacgcagatatccgggctggcaaccgaagagaggcggcgcatctcgccgaaatggttgacgcccatttccagtatggccacctgatgctcttcgttcatttcaaagattgtaagaggaagtccccactcgttattgaagttgccaatggtcttgtgtaccttatatttctgggcgactacagaagcgatcatctctttggtgcttgtctttcccacgcttccggtaattcccacaaccttgacgtcaaaggaatcccggtacagtttggcaatatcaagaagcgcttgtccggtggattctaccaggatgtaagagaaatccgtatctccaaggtcttcgtgggaaatgacgcataatgcgcctttttctatagtatcagggatgaactgatgggcattgacattctcgccgtctattgcgacgaacagataatccttctgtaccttccgactatcgatcactactcctcctacttccctgcccagcttgctttcgtctccgtgatagacgcctttacaggctttggtaatgttttctagggtaaggttcttcattttccttgtcctccttattttgtgaaaatacgaccaggcctctgccccaagggcaaagacctgacagtttctagtcttggtagcgtgttttcatggattcttcaataattaactcgcacaggtcgccataatccactccgatggctctggctgatttgggaatcaaactggccggagtcatgcctggcaggccgttcatttccagacagtagaactttccatccgtctcatcgacaatgaagtcggcgcgggcatagacatccatgtgcagcacccgaaaagccttctcgcccgcacgctggatctttgcctgagtcttatcatccagggataccggcggacagagttcctgagcgccgccgtcctgatacttattctcgtaattgaagattccgtcttttggaatgatctcgatcagcggaagggcctttcctgcgatgatgctgcaggcatactcacgtcctttgatataaggctcgatgacgacttcgtcttcgtgatttacatcaaaggagcagcggatggcttcccgatattcctcctctgtatgaacaatatatactccgatgctggaaccgccggaacatggctttatgacaagcggcaggtagtagcccagcttctcaaggggagtatccttggtggcacggttcagggaagtgcctcttggcgtaggcacgccggaacgcttgaagatctgcttggcaaccagtttatccatggacagggcacaaccaaaggaattgggacctgtatacttgattccaagaatatcgaaagttgcctggagtttcccattttctccaacagagccgtgaagccccataaatgttatgtcagcaatacggcataggtcgataacattcgggccaaggtaacagtcggactggtccgggcgcgaagccctcagcgcttcaaggtcaggcgtggtagtcttgatgccctctgcgatctcaagcccgccgccaggcaggtcgaatacctcttccagtttatcgggatcataaggtaatccgaagaacacatccagcagatatgccttgtgccctttttctctcagagttctgcaaataccggcgcctgatatgagcgacacgtcgcgttcagggctgagtcctcctgctaaaacaataattttcataaataatagtctccttctagtctgtcatgctcatttgatccaacaaggatttcttcacttcataaagcttaggggatagatccacgtatacttgatgcggatagaagagacgcttggtctcatcccacagtgtcttcttttcattcctgcagtattcggcgatctccattactgacggagacttgtatatgcacgctccattcttgaataccggtaccagaatctcgcgcatgatgtaagagccgcccgaaagcttcgtctttttccaagtctcgatgggatcgaagagaagcatatcctcatccgtgttaaatgtctcgcctacgaagcagatcaagtcggcttttactttgcctgttgttttatcatatatccgatagatggttttgttaccaggattggtaattttttctgtattttccgatatctttatcttaggctcgaatgcgccatcctcctctgactggatggcagcaagtttgtatacgccgccgaaagaagggcagtccttggaagtgatcaggtttgttccaacgccccaggaatcaatggcagcgccctgcatcttcaagtcatggagcaagtactcgtccagatcattcgaagcgcagatggatgcatcggcaaaccctgcctcgtcaagcatcttgcgggcttctttggaaagataggcaaggtcgccgctgtctaagcggatgccatacttcttaaatggctttccagcctctttaaactcctggaatacccggattgcatttgggactccggactttaatgtatcataggtatctaccagaagagtacagttatccggatacatatccgcatagttcttgaaagcagtatattcatccgggaaactcataatccagctgtgtgcatgggttcccataaccggaacatcaaagagcttgccagcaagaacattagaggttcctacgcatccgccgatcatagcggcccttgctccatacaggcctgcgtccggcccctgcgcccttcttaatccaaattccatgataccatcgccattggcggcaaataccacgcgggaggtcttggtggcgatcagagactgatggttgataatgttcaaaattgccgtctctaccagctgtgcttccataatcggcgcaattacctttaggatgggctcttttgggaagattaccgttccctcgggaatcgcgtagatatctccgctgaaatggaacccgctcaagtaatgcaggaagtcttcgttgaagattcccaagcctcttaagtagtcaacgtcctcataggtaaagttcagattcttgatataatcaatgacctgatcaagcccggcgcaaacagaatagccgttgttgctgggattctggcggaagaatacatcgaatatgaccttctcgttctgtccctttgcgtaatatccttgcatcatcgttaattcatacaagtctgtcagcaaagttagatcttgtctgttcatttctctttaatactcctttttatctggcagtgtaaccaactgcattataattatgaatgtaaattccgttatattatagcacttgaacggtaaaatgtaaaagaaaaaagtagaccttgtagaacagtttgattcatactataataatagaacaagtatgaaagaaaataaggaggagtcggaaatgaccccagtttatgaagtaaggacaaaacatacagagcaagttctgaaagattttatctcatttaaagaagctgaaaggaatgcgcatatcactttccgtatcgtgatgcttggtatctgcgacgttaccctggcgtatctgggaaagggatctgcgttgacctatatattcgggatcctggcagttctgacatttgcgtttgcgctggcaagaaagcctatcggcgtacgccggctggctaaggcagacaagaattatcagaaccagagcgagatacactttatctttggagagagcgaatttcggatagagaatccggatgcaggggatccgcagagggtcaagtatggagaagtggcgttcatgtatacggataacaagtactattatattaatgttaacaacgaagacatgcatatgattcccaaggaagatttcacgcttggcagtccagaaggattctacgattttatcatggataagaccggaaagcagctgaagcctttgaaacttacctggaagatgaagaccagcatactaaagcaggcatggatggaagtccagagccagaagaatacagataagaaataggacaagatggcaaagaaccagacgcttatacaagcgcctggttctttttgattgtttctaatatgatatcctggcaatagtccccgatatgcttgcgggtctccttgtcgagatcctttggatagatcggcttgccatattccaggattacgtgcaccttcttgattctcggaaactgcttctcgaagatggagatggtgttgttcatggacatgggaacgatcgcgcacccggtcttctcggcaatcttaaaagagccgttatggaagggaaggatgctgagttcctcgccgtcattgcgggttccttccggaaagatacagatagagacgcctttctttacataatcaatggcagtcaggatcgtcttaaggccttccttcgggttatccctgtcaaggaaaagacagtacagccgcttcatccagtcccgcagcaggggatacttaagcatctccttcttggcaatatatccggtgagcctttggcagcgggaataagtaagcagaatgtcaaagtaacttctatggttgccgataaaaagcacgggctcatccggaatattctcctcgccaatcacggtcacatgcacgccggatattttaagaatcaccttaaaagcccattgtaccatccgcaggctttggtaatcgcaggccttcttattgaattttccaattagccactcgactccgagcacgggtattccaagtaccaggtaaagacctaagaatagaactacaaatataaatcttatcatccgtataacctctcaatccagatattttagtcatagaataattatcctccatacggaaaaagatgtaaaggacaaaactaatatttctcaggttttcggaaaaaagtcttctgaaggaagcccatcagcctcatgctcaggaggaattcggtcattccgcctttctgacagtgacgtgcggacgtctcaaccagggcgtcgaccaccttctccgtgcgatcccgcagttccccggtcagatgcgcggtcaggggctctgttgccagggtcaattctgagaaatggtagtaagggttagcggccatataaaggaaggtgtcgtaactaaagcggcactgttctaccttcatgggcccgtctcccggaaagaactggaaataatggtaagcgcccaagcacataagcgtcccccggctaaccggatattcccgggtgttgactacaatcttgccgttactgtcgcggaaatacagcagggtgatgccgctgttctttttcaggaccgtctgcgatgtaacgatcttgcttacggcagtcaccggaaactggaagtcttctttggagtagtatttcgcgcttgcaaaaagcggcgggtaattgatggagtttttagactttgtcattggttttcacctccccggttgagacttcggtattcgccaggcgtcatctgatagagtttatgaaaggccctggaaaaggagcggctgcagttgaatcccacattaaccgcaatatccagcaccggaagattcgtggtaagcagaagggcggcagcatgccgcagcctggtaaggacggtgatgtccttgtaggaagcgccgaatttctcctggaccagttcccggataacgctctcggacagataaagggatttggaggtatccttgatgtcgatgggagatgaaaagcttgcataggagtgattcagcacatccatcagcatctgactcatgatcatgccccggtatactttctccccgctctccagcatctgcttgcggtattccagaggcgtcgtcccagtatatttcttaaagatgcgataaaaggcaacttccgaggagaatccggaatgctcggccacgtacgacagtgacatatcttcgtagagaagcgcgccggaagcaatgtttacccgtacgcgattcagcgtgtgggcaaagttgtagccgctgatattgcgcagttcccggttcagcgtagaggcgctggtagagaagcgctcagccacgctctcggccgtaatgtcctcggcaaaatgggagccgatataaagagttgcctgccatccaagaggccagtcccggctctggtcttcctggttttgacggatactgtgcttgatgaaaaagtatgaaaactgtccgagaatagagacctttatcagggaactgccagggtcgaagcaggaatcttccttttcaaattcatcgtataaatcccggatcttttgcagatattctccttccagccggataacggggagggcgaccataatggcatccaccgtatcagggcttggctccctgagcgccagaaaggaagagagcggatagtcatacacgcagatggacaactcaaggggatcgtcggaatccgccttgatcgtgaacgtgtggtacgactgaagccagacgaaggtaccctgttcaaatgggaattctacgccattgatcgtgattgtgccgcgtccggaattcaccagtatgaacaaggattcgttctcacagatgggcggggtgatgtcgctgatggtatgcttctgcaggcgcagatatttgtcctttccggtaaagaccgaatggacagggctgccacatatcggcctggattttattgtgtttggcatggttatgctccttccttaactaggcgagtctgaaaattatgtgagaagttacaattctgatagtattatagcacgttttgtcccttaatcaattagatattaccaacaaaaagtaatctttactattgtaagatgccacgaaattatccgatattgtaacaggtaaaaatgttaaagttatatcaagcaaaagaagaaaatgttgaaaaaatgtacaaatagcacgtagaaaagatattaagcattaagaaaatgcacaaaaaatcaacgtgtgagagggagggaaaggagttgaagcgtgacttttttaacaagtttaatttggggacatcgaactttgtcacgccgggaaaacagttggaatacgtttcggaatgcaagccagattctactgcggtcatctgcttagataaagaacagaactgttccgttattacctggcatcagctgcacgtctattccagccagctggcatggtaccttatagaaaacgagatcggcccggggtcgatcgtacttacaatgtttccaaacagcattgagcacattatagcggtatttgctatctggaagacgggcgcctgctatatgcccatgtcctataaggcggcggaatccgagatcagggaggcctgcgataccatccacccgaatgcggcttttgcggaatgcaagattccaggattaaaattctgccttagcgcagacgagatatatgaggcaatggaaggaagatccaaggagatgccttcggaccggctggccaatccgaacatgatatccttatcaggcggaaccagcggaaagatgaagttcattcgtcagaaccttccatgcgggctggatgatgagacgatcagaagctggtctttcatgtctggaatgggatttgagcagcgccagctgctggtaggcccgctgtttcatggcgcgcctcactccgcggcgtttaatggactgttcatgggcaataccctggtactgaccagaaacctttgcccgggaaatatcctgaacatgattaagaaatataagattgaatttatacagatggtgccgaccttgatgaaccggcttgccaaactggagggagtcggaaaagaagacttcgcatccctgaaggcgctatgccatacagggggcgtctgttctccctggcttaagcagatctggatcgacctgctgggacctgaaaagatctatgagatgtattccatgactgaatgcatcggccttacctgtatccggggagacgagtgggtgaagcatccgggaagcatcggccggccggtgggcgactgcaaggtgtctatccaggatgagaatggaagggaagttgcgcctcttgagattggcgagatctatatgacggcgccagcctcttatctggttaccgagtacatcaattgggagccgctggaagtgaaagagggaggcttccgaagcgtaggggatatcggctacgtggatgagcagggctatctgtacttttctgaccggcgcagcgacatgctggtatcaggcggagaaaacgtgttcgccaccgaagtcgagacagcgcttttgagatataaggatatcctggatgctgtagtggtagggataccggacgaagatatggggcgaaggctccacgcggttattgagtcagggaaagagatacccgcagaggaactgaaaacgttccttggacagtatctgactccatacaagataccaaagacattcgagttcgtaaggagcatacgaaggggggacaatggaaaggccgacaggaagcggatcctggaagattgtattgcccgcggggtatgattctaaaaatgcaaagaaaacaaattatataaaggaggagtaacaaaatgagttacgaagcacttttttcaccattcaaggtcagaggactggaacttaagaaccgtatcgtcctgcctggaatgaacaccaagatggcaaagaataagcacgacattggcgaggatatgatagcctaccatgttgccagggcaaaagcgggatgcgcgttaaatatatttgaatgtgtagccttatgtccggcgcctcacgcttatatgtatatggggctttacacgggccatcatgtagaacagtttaagaaattgacggatgcagtccatgaagcaggcggcaagatggggatccagttgtggcatggagggttcagcccgcagatgttctttgatgagaccaacactctggaaactccggacactcttacggtagagagaatccatgagattgtagaagaattcggacgcggcgcaagactggctgttcaggctggatttgatgcagtggaattccatgcggcccacagttatctgcctcacgagttcttaagcccgggaatgaataaacgtacggatgagtacggcggaagttttgagaaccgctgcagattctgctatgaagtcgttcaggcaatccggtctaatattccggatgatatgccattctttatgcgtgcagactgtatcgatgaactgatggaacagaccatgacagaggaagagatcgttacatttatcaacaagtgcgcagaacttggcgtggatgtggcagacctttcccgtggaaacgcgacttcattcgcaactgtatatgaagtaccgccattcaacctggctcatggcttcaacattgaaaatatttacaatattaaaaagcagatcaatatcccggttatgggagtcggccgtatcaatacaggagagatggcaaacaaggtgattgaagaaggcaagtttgacctggtaggcatcggacgcgcccagcttgcagatccgaattggatcaccaaagtaagagaaggcaaagaagacttgatccgtcactgtatcggatgtgaccagggatgctatgacgcagtcattaatccaaagatgaagcatatcacctgcacccacaatccaggattgtgcttagagtatcagggaatgccaaagacagacgctcctaagaaagtcatgatcgtaggaggcggaatggcaggcatgatcgccgcagaagtattaaagaccagaggccataacccggtaatcttcgaggcatccgacaagctggcgggacagttcaggctggcaggcgtagcgccgatgaagcaggattgggcagatgctgcagaatgggaagcaaaagaagtagagcgccttggaatcgaagtacgtctgaataccgaggtgacagcagagactatcaaggaattcaatccggacaatgtcatcatcgcagttggctctacctatgcgctgcctgagattccaggaatcgacagcccaagcgtatactctcagtatcaggtactgaaaggggaagtaaatcctacaggccgtgtagccgttatcggatgcggactggttggtacggaagtcgcagaacttctggcatccagaggcgcacaggtaatcgcaatcgagaggaagggcgtaggtaccggccttagcatgcttcgcagaatgttcatgagtccggaattcaaatattataagattgcgaagatgtccggaacaaatgtcaccgctttagagcagggcaaggttcactacatcatgacagacaggaagaccaaagaagtgacgcagggagtcctggaatgcgacgctgccgttatctgtacaggaattaccgcacgtccaagcgatggactgaaggcaagatgcgaagaacttggaatcccggttgaggtaatcggagacgctgccggcgcaagagactgcacaatcgcgacccgcgaaggctacgacgcaggaatggcaatctagaaaatcagaacttatcaatcatacatatagaaaggatgatacatatgacattagaagagagagttgaagcattagaaaaagaactgcagaagatgaaggatatcgaggcgatcaaagaactgaaaggaaagtatttccgctgcctggacggaaagatgtgggatgaactggagaccactctgtcaccaaatatcgtaacctcttattccaacggtaaactggtattccatagcccgaaggaagttaccgattacttaaagagcacaatgccaaaagaagagatcagcatgcatatgggccacacgccggagatcaccattgacagcgagactacggctacgggcagatggtatctggaagataaactgatctttacggacggcaagtacaaagatgtggggattaacggcggcgcgttctatacagacaaatacgagaaaatagaaggccagtggtacatccttgaaacaggctatgtacgaatctatgaagaacatttcatgcgtgatccgaagatccatatcacgatgaacatgcacaaataagaacattgtaaaagaaaggcaggagtaagattatgaatctcgtacaagacaaggttaccatcatcacgggcggcacaagaggcattggattcgccgctgcgaaaatatttatcgacaatggagcgaaagtatccatcttcggagagacgcaggaagaagtagatacagcgcttgcacagttaaaggaactttatccggaagaagaggttctgggattcgcgccagaccttacatccagagatgcggttatggcagcggtaggccaggtggcacagaagcatggcagactggatgtcatgatcaataatgcgggcattaccagcaataacgtattctcaagagtgtcagaagaagagtttaagcacatcatggatattaatgtggtaggcgtattcaacggcgcatggtccgcttaccaatgcatgaaggaggccaagaaaggcgtaatcatcaatacggcttccgttacaggcatcttcggatcactctccggcgtaggctatccggccagcaaggcaggcgtaatcggccttacccagggacttggaagagagatcatccgtaagaacatccgtgtagtaggagtagctcctggagttgtcaacacagacatgaccaacggcaatcctccggagattatggaaggatacttgaaagcgcttccgatgaagagaatgcttgagccggaagaaatcgctaatgtatacctgttcctggcatccgacctggcaagcggcattacggctactacggttagcgtagacggagcttacagaccataattttgatttttacaaagtagaatatgtgatagaaaaggagatataaaaacatggctggattaaaagattttccaaaattcggagctcttgcagggcttaagatacttgacagcggatctaacattgccggacctttaggcggaggacttctggcagaatgcggagcaacggtcatccattttgaaggaccaaagaaacctgacaaccagagaggatggtacggctatccacagaatcaccgtaatcagttatccatggtagcggatatcaaatctgaagaaggaaggaagatcttccttgatctgatcaaatgggcagatatctgggtagagtcatccaaaggcggtcagtatgacaggctgggactttccgatgaagtcatctgggaagtaaatcctaagattgccatcgtgcacgtatccggatacggacagacaggagacccatcttacgttacacgtgcatcctatgacgcagtaggccaggcattcagcggctatatgtcactgaacggaacaacggaggcgctgaagatcaatccttatctgagcgatttcgtatgcggacttaccacatgctgggctatgcttgcctgctatgtaagcaccattcttaccggaaagggagaatctgttgatgttgcacagtacgaagcactggcacgtatcatggacggacgtatgatccagtacgccacagacggcgtgaagatgccaagaaccggcaataaggacgcgcaggctgccctgttcagtttctacacctgtaaagacggacgtacgatcttcatcggaatgaccggtgcggaagtatgtaagagaggatttccgatcatcggacttcctgtaccaggaaccggagacccggacttcccggaaggcttcacaggctggatgatctatactcctgtaggacagagaatggaaaaggctatggagaagtatgtatctgagcatacgatggaagaagtagaagcggagatgcaggcgcatcagattccatgccagagagtatacgagctggaagactgcctgaacgatcctcactggaaagcgcgtgggacaatcacggagtgggatgacccgatgatgggacatattacaggccttggactgatcaacaagttcaaaagaaatccttccgagatctggagaggcgctccgctgttcggtatggataaccgcgatatcctgaaagacctgggatatgacgatgcaaagatcgatgaactctatgagcagggcatcgtcaatgaattcgaccttgacactactatcaaacgctatagactggatgaagtaattccacatatgagaaagaaagaggagtaagagtatgagcaccgtagccaatcctaattataagaaaggttttgtcccctttgcaattgcagcactcctggtgagcctgatcggcggttttaccgccgttctcggcccggccttcgtggcggaccaggggattgactataataataccacatggatttctctggcactggcgatgtcttccgccgcatgcgctccaatccttggaaaactgggagacgtgctgggacgcaggacgacgctgcttcttggtatcgtgatctttgcgaccggcaatgtgctgacagccgtagccacgtccctaatattcatgctggcagcccgttttatcgtaggtatcggaacagcagcgatctcgccgatcgttatggcctatatcgtaaccgagtatccgcaggaggagacaggaaaggcctttggcctttatatgctgatctccagcggcgccgttgtggtgggacctacctgtggaggcctgatcatgaatgcggcaggatggagagtcatgatgtgggtatgcgtcgctctgtgcgtggctgtattcataatctgtgcattctccattaagaagactgcatttgagaagaagagcatggcaggatttgacaagccgggcgcagccctggtagtcgtattcttcagcttgttcctgtgcatcccatccttcggacagaacatcggatggtcttccacagcatttatcgcagctgcggcagtagcgctggtggcgcttttcatcctggtaatggtagaaaagaaagcgaagagtccgatcatgaacggcaagtttatggcacgcaaggaattcgtgcttccagtattgatcctgttccttactcagggacttatgatggcaaatatgaccaatgtcatcgtgttcgtgcgctatacccagccggacaatgtcattatatcaagttttgcgatctccatcatgtacataggaatgtctttaggctccgttatcattggacctgttgcagataagaaagagccaaagacggttctgacattctctctggtactgacagccatcggctgtgcgctgatgtatctgttcaaggcagattcctccgtcgctatctttgcggcatccttgggaatccttggatttggccttgggggaaatgcaaccatcttcatgaaggtagcgctttccggcctgtccagcgaagtagctggctctggtactggaacctatggcctgttcagagatatctcggcaccattcggcgtggcagtgttcgtgcctatgtttgccaacggcgtaacagcgaatatcgcaaaatatgcgtcaggcggcatggaagaaggcgccgctacggtaaaagcagccatctcatccatccagacgctgacattggttgaacttggatgtatcgttgtgggaatcatccttgtgagaatgctgccaagaatctatcagaagaaagaggcataaataagttaagaaaagaggtaattataaatggatatgaaacattccagattattttcgccgcttcagatcggatccctgacactgtctaaccgtgtcggcatggctcccatgagcatggactatgaagcagcagacggaactgtgcctaagaggctggcggacgtatttgtccgccgcgccgagggaggcacaggctacgtcatgatcgatgcggtgacgatagacagcaagtatccttatatgggaaatacaacggcccttgaccgtgatgaactggttccccagtttaaggaatttgccgacagaataaaagaagcaggcagcacgctggtgccgcagatcattcatccgggtccggaatccatatgcggctaccggcatatcgctccgcttggcccttctgccaacaccaatgctaactgccatgtgagcagatcgatcagtatagatgagatccatgacattataaagcagttcggccaggcggcgcgccgcgccgaggaagcaggctgcggggcgatctctctgcactgcgcgcatgcatatatgctgccaggatccttcctgtcaccacttcgaaacaagcgcatggatgaatatggcggaagccttgacaaccgtgcccgttttgtgatcgagatgattgaggaggcccgcaggaatgtgagccttgatttccctattttccttcgtatctccggagacgagagaatggtaggaggcaacagccttgaagatatgctctacctggcgccgaagttcgaggctgctggcgtaagcatgctggaaatatccggcggaacccagtatgaaggcctggaacatatcattccttgccagaataagagcaggggcgtcaatgtatatgaagcttctgagatcaagaaagtagtgggcattccggtatatgcagtaggcaagatcaacgatatccgctatgcggcagagatcgtagagcgcggcctggtagacggcgtggctatgggacgtccgcttctggcagatccggatctttgcaagaaggcagtaaaaggtcagtttgacgagatcactccttgcgcaagctgcggaggaagctgcatcagccgttccgaggcagcgcctgagtgccattgccatattaacccaaggcttggccgggagtatgaattcccggatgtgcctgccgggaagtccaaaaaggttctggttatcggcgcaggccctggaggaatgatggctgcagtgacagctgcggaacgaggccatgatgttaccgtatgggaggctgatgacaagatcggcggtcagctgaacctggcagtagtggctccgggcaagcaggagatgactcagtggatggtgcatcttaactatcgtgcgaagaaagcaggcgtgaagtttgaattcaataaagaagcgacggcagaagatgtcaaggcgctggcgccggaagcggtgatcgttgccacaggcgcgaaaccgctggttccaccgattaaaggaacacaggattatccggtgcttaccgcccatgatttccttcgcggcaagttcgtgattccgaagggacgcgtctgcgtgctgggaggaggcgctgttgcctgcgagactgccgagacagtcctggagaatgcacgtccgaattcttataccagaggatacgatgcaagcatcggagatattgatgtaacgcttgtggagatgcttccgcagctccttaccggcgtatgcgccccaaaccgcgagccgctgatccgcaagttaaagagcaagggcgtacatatcaacgtcaataccaagatcatggaagtaacagaccatgaagtaaaggttcagagacagaatggaacgcaggagtggctggaaggatttgactatgtcctctttggccttggttccagaaactacgatccgctttcagagaccctcaaggaattcgttccggaagtacatgtcatcggtgatgccgtaagggcgcgccaggcaagctacgcgatgtgggaaggatttgagaaggcatacagcctgtaaaagcggttagagtaaaaaggaggcttaagaaatggcagtgaaggcaatctcaggcagcgacaaggatcaggaactgatcattgataccttgaagcatgccagaaggcaggagtatacgccccagaggctgtgcgagcttcagaagatcattgagacccagtattattactggtggatcatggatatgaagaaagaagaattctgcctggaactgttcgatgaagacttccaatactactataatggctatctggcatcaactaagccagaagaacaggccaggacatccaaatgggtcaatgcgcctctggcaacgatgcatatgggccatcagcctctcgtatggctcatggacgagaaaaatgccaggggaatcttccagtatgaggaccaccaggtctatcgggaaagcggcgaagtcgtggagacatggatggtatactgtaatgatttctgcaaggatgaaaaaggaatctggcacatcaagacgatgcgtatgatcaagcggcaagctgacggccgctaccatgacatcaatccaccggaaggctggatgccagaagagtgggatacatgtgatttttaaaaaaggagacaggatgaatcttcggggagatatcatcctgtcttttactatcctcttccatataataatgtaagttcttttaattcctcggcaagggaagggcttaaagcgtcctttttaaagcgccagctccagttgtcagaagccgtgccaggaatgttcatgcgggccgtcgagccatagcctagcagatcctgcagcggaaagatactgtagcgggcaatgctcccaaggcaggtgcggatcaggcagcggccaatctgcgacgcgtccttgcagcaggtatagcgtcgcaccttttcctgacagtcgggcggaagatgctggtaccagccggaagtggtgtcgttgtcgtgggtacctgtatagcagacgcagtccggcgaagtaaactgatgcggaagatagctgctctctaaagtagaatcaaaagcgaactgaagcaccttcattcccgggaaatggaaatgttctcgcagcgcattgacctcatcggtgatgatgcccagatcttcggcgataataggaagatcgtctcccagggcattctggatggcgttaaagagttcatagccaggagcctgcacccattgcccattgatggcggtcttctccccgtattccaccgaccagtaggcctcaaacccgcggaaatgatcaatccggaggatatcaaggacatccagctgatgccggattctggagatccaccaggcaaagccttcttccttatgggcatcccaggcatacagcggattgccccacagctgtcccgtggcagagaagtaatccggcggaaccccggccaccttgaggggatagccgtttgaatccagttggaagagatgctggctggcccatacgtctgcgctgtccatggaaacaaatatggggatatccccgataatccggatatccttttgattggcatattctttcaggcgcatccattcatcaaagaacaagaactgcgtgaattggtagaagccaatggtctgtgccaggcggcctcgaagccggtcttttatgtcttctgtgggattgcggtattgatcttcccattccagccagctgcgcccttcgtttcgttccttgcatgccatgaacagagcatagtcattaagccagcagccttgttcctggacaaacctggaaaagccttccttcagcttctgattatcatagtcatctctgcagaattcccgatatgctgcttccaggatatgctgcttccaggggatcagtgttccgtagtctacgcgctcgtcgtcggaagcagggcagccctccagatccttatctcctacaagccccagacgctttaagccggaagggctgatcaagagcggctgtccggcaaaggcagaaaaactctggtaaggcgagtctccatatccggtgtgcgtaagcggcaggatctgccagagatgctggcctgccgttgcaagaaagtctacgaatttgtaggccgcctctccaagatccccaattccgtagggcgatggcagcgaagtcggatgcagcaggatgccggagagtcttcttttatctttcatgagtttcctccttctatactattttcgtacgaatagacctcattatactacaaatttggtatttttcctagcattgctgtgtatgatgttaaagagaatatgctcttatgagggattctatgaagaaacgatggggaatactgctgctggccttttgtcttcttggcctgacggcgtgcgccgcaggaaagttggacacggagaagatacgggatattgaattcacggttctttccaaagaggaggtgccggaagaattcatgacacagatagaagaagaaaagagcggtcagatgaagctaaactatggggacaaaggatacctgtacatagccagaggatacggaaccaagaagaccaccggctatagcgtggaagttttccaatgctatgagaccgggaattcagtcgtcataaagaccggtcttcaagggcccggcaaaaaagaggagattcttaagaagaagacctatccttacgtggtaataaagatggagtatacagataaacaagtagtatttaagtaggaggcgcagatatggaatatgtaacaaagcagatgcagacttacaggactggcaagaccatcactgaccagttctacattgatgacgattataatgtaccggacgcgaaaagcgatgtgaaaagagtcatacttggcgagggaacgctggcggttgaagatatgaagattgtggaaaattatatccgggtggccggcaagatgaacttcaaggtgctttatgtgacggatgagggcgagacacgcctgtcctgtctggagggacggattccctttgaagagatgatctatctggaccaagatccggtgggagacctgttcatccagtcctcaagcgtagatctgaccgtcacggccattcattcccgaaaattgaatcttaagaccctggctgagatatccatctgctctgaaggacgtaaggaagcggagatcactacggacattgacagcgatacgcccctttataagcggcatgagagcaaggaactgcttcgggtattcaccacgaaaaaggatacataccgcattaaggaagaggtttccatcagcggcacgaaggagaatatcggcacgcttttgtggacggaggtcaacagcaggaagctggatacgaggcttgaggcggacgaactgaaactacagggcgaactgctgcttttctgcttctatgagtctctggatggcaagacggactggattgaacagacaattccatatgaaggacgtatagaatgctatggagtacaggataatatgtatcaccagatatatccagaacttacggatgtgaacatcgacgtgcgtatggatgaggatggagaaatgcgcctgatcggagtagaggcgaccctggaagtacggctgatcatatatgaagaagaacaggttgatatcctttcggacatctattccttggagcaggcgtgcactccaagagtgaaagaagagtggatggagcagcttctgttgcagaaccactctaaatgcaaggtgacagagcagctctccctcccggagattaaagatgatatcctgcagatctgccacagcagcgcccggatccagatcgagcggacggaaccagcggacaatggaattcagatcgaaggcgtgctgcacatcagttttctgtatgtaaaggcggatgataccataccgtttgatacatggcagggaatgataccattttcctatctgcttgagggcaacgaggcttccgcggatatggtctatgggctgacttctgcggtggagcagctctccatagggcttctgggcagcgatgagattgagatcaaggctgtgcttgcattcaacagcttcctgaagaagccggttcgaatcatgaatatcgaggaagtggagtttgcgcccattgatatggaagaggtggaaagaaggcctggaattaccggctacatcgtgagagaaggcgatgcgctgtgggatcttgccaagagatatagcaccacggtagaaggaatcatggaggtaaacggactggaaaaagatgagataaaaccaggggataagatattgatttttaaggagaatatgagtatactgtaggtacactgtatacaagatacaaggagaaaacatatggataagctggacttaaaagcactgggaaagataaatctgggactggatgtattgggaaagagagagaatggctaccatgacgtacgaatggtaatgcagacagtgtatctctatgaccagattcgcattgagaagaggaaggagccgggaatcagcctgtccaccaacctgttctacctgccggtaaatgagaataatctggcttaccgggcagccagcctgctgatggaggagttccacatcaaagagggcgtaaagatcaccctggataagcatattccagtggctgccgggatggctggaggaagttccaatgcagcggcagtcttatttgggatcaaccgtatgttttcacttggactgtcacagaaagacctgatggaacgcgcagtgtcgctgggagccgacgtgccttactgtatcatgaggggaaccgtgctggcagaaggaatcggagagattctgacgccccttccaaatatgcccaaatgccatgtcctgctctccaagccgccgatcagcgtatctaccaagctggtctatgagaaactggattcttatgacagtatcgaacatccggacattgatggaatcataaaggggctaaaagatggggatattaagaaggtagcctccagcatgggcaatgtgctggaaaatgtaaccatagaggaacatccggtcatcgaagagattaagaacgtgatgcgcaaagaaggcgcgctaaatgccatgatgagcggaagcggctctaccgtattcgggctgttcgaagacaagaagagggccaagaaggctgccgcgaggataaaggagttacaattggcgaagcaggcgtacgtgaccggcgtacataatgcaaggaggaaataaatgatggaaccgaactttaaagtgaatatgaatgagtacctgcctttacgggacgtggtgttcaatacgcttcgccaggcgatcctgcgaggcgagttaaagccgggcgagaggcttatggagatccaacttgccaataagctgggagtaagccgtacgccgattagggaggccatccgcaagctggaactggaaggccttgtcctgatgattccaagaaaaggggccgaggtagctgagattacggagaagagtctaagagacgtcctggaagtgcgaagagcgctggaagaactggccgtacagctggcgtgcgagaagattaccaaagaagagatacgcgagttggaacgcgtggcaaaggagttccagcaggtggtaaatagcagtgatattaccgagattgcggaagtggacgtatgtttccacgatattatctatacagcaacggataaccagaagctgatccagcttcttaacaacctgcgtgagcagatgtatcgctaccgggtagagtatctgaagcgggacggcgtgtttccccagctcattgccgagcatgaggcgatcatccgtcatatcgagaataacgagaaagagaaggccacggaggtcatgtgcaggcatattgacaaccaggtagagacggtgatcgacgtgatccgggcaaaacatagctagcagttgaataaaaggcctttcatatgtcaagactcctaataacagtgaaggaggtacgttacatatggaaggaaagaaaaattatttggaaagatatagaatcagacagatcatctgtgttatacttggaatctgcattgccctggccgcaacgctgcttcttaccgcaagccgcatgaagcaggtggacgcgaaggtcgctcgtacccaggagtcgctggcgaaggaagtgtttcgcttccatgtgctggccaacagcgacagcgacgaggatcaggcagtgaaactgaaggtgcgggacgcagtcattacttatatgaaggaaagcatggatgaagagatagaaggaagtacggatgcaaaggatacgaaggagtgggccaaggcacatctggaggaactggaacaggtagccgacagcgtgatcgcaagggaaggatactcctatcaggcggaggcggaagtgaccacctgttatttcccggataagcgttacggagacatcctgtttccgcaaggagattacgaggcgctcaggatcaaacttggaaaggccaaaggccataactggtggtgcgtcctgtatcccaacctgtgctttaccaattctacctgtgccgtagtcagcgatgatgggaaagaagaactgaaagaagcgctgacggcagaggaatacgagatggttaccgctacctcggactttaagataaaatggttcttcttcggagaggattccgaagaggattaggagaaacatggaggcagttttcatgactgaatttttagttagacattttgttaagaatcacgaagacgttgaaaaggtgtctgtccgcaccgcctatggagtattggcgagcgtggtgggcatcttttgcaacgttcttttgtttgtggtcaagggggctgttggattcttcctgcacagcgtctctgtcatggcagatgcgttcaataatctgtcagatgccggctcttccatcgtagggcttgtgggggtaaggatggccagcaagccggcggatgaggagcatccttttggccatggaaggattgaatatatagcggcgcttgtggtatccttcctggtactgcaggttggatttacattttttaaagattccatccgcaagatacagaacccggaagagttaaaattccaggcagtatccgtcatcatactggttctgtccattggcgtgaaactgtggatgggcatgtttaataagaagcttgggaagaagattgattccaaagtgatgatggctacggctacggatgccatgggagacgtggtgacgacgaccgccaccatcgcgtccgttttattttttaagattacgggaatcaatattgacggaatcgtaggaatcggcgtatccctggtggtaatgtgggccggaatcggcattgccaaagatactttggagccgctgattggcgaggcagtggctccggaagagtatgtgaggatcagcaggttcgtggaaaagtatgaagggatcgtggggagtcatgacctgatcgtgcacaattacgggccgggcaggagcatggcatccatccatgcggaggtacccaatgacgtggacatcgaagtttcccacgagatcatagaccggatcgagcgggatgcggccaagcgtctgggaatattcctggtaatacatatggatccggtggagacgaaggacgcgcatgtgctggaggtgcggcatcaggtggagcagatattggatgcagtggacttccgcgtatccatccatgatttccgcatggtggacggaaaagaacagatcaatctgatctttgacatggtggtgccctttgagtacagtacgcagaaacagaatgaactgaagatgacgcttcggaagctgcttcagatggcagataaaagataccagtgcgttatcaccattgaaaggagttatgtagcaagtgcaaagggataatcaatatacttttaaaagcagggtaagattcagcgaagtagatcacaccaaacggatcacgcttccggggatcgtaaactatttccaggactgcagcacctttcagtcggaagaactgggccttggagtagaccacttcgcaaaacataaaagggcgtggatcctgtctgcctggcaggtcgtgatcgacagatacccttccctgggggaagagatcagcgtcagtacctgggctaccgaattcaacggcctctatgggcttcgtaacttctgtatggaagatgaagggcggcagatgactgcctgcgccaactcggtatgggtctatatggatatagagaagggaaggccggcaaagccgggagaagacgagacgaaggcatacggagaaggggagcccctgaagatggagtatgcgcccaggaagatcgcgcttgcgaaggatgcagagcctatggatgcatttccggtaaggaaatatcatatagataccaatgaacatgtcaacaactgccagtatgtgcagatggctttggaagtactgaaagaacggatggaagtacggcagctgcgggtagaatataagagatcggccgtatatggggatgtcatctatccccggacagcgtatgaaaaagaccggacggtagtggaactgtgcgatgaagcaggaaagccctacgcagtcgtagaactaaagtagaggcaagggattaagaaggaggaaagcatgacattagaagaaggattaggaacaaagaagacgcttatggtggtaaaagaagtggaattcggcgtgtacctggggaacagccaggagaaggtacttctgccgaaaaagcaggtgccggaaggcgtggaggtgggagatccaatcgaagtattcctgtataaggattcttcggacaggctgattgccaccaccaacgagccaaagatcatgctgggagagctggcagtacttaacgtcgctgcgacgggcgggattggcgcatttctggactgggggctggagaaggatctgctgcttcccttccgggagcagacggcgccgcttaagaagggggaccagatcctggtagccctatatatcgacaagtcgcaaagactgtgcgccaccatgaaggtctacgaaaggctgcgtacggattctccttataaagtggatgaccaggtggaaggaatcatctatgagttaagcgataatttcggcgtattcgtggcagtggacaatctctattccgcattgatacctaagagggaagcctttgggaagctcagagtgggagacagagtaaaagcaagggttgtgaaagtaaaagaggacggaaaattagacctcagcgtgagggagaaggcttttctccagatggatgtggatgcggacttgattatgaagcggatggaggaatatggcggaagccttccttttaccgataaggctgacccggaattgatcaagaaggagtttgatttaagcaagaacgcgttcaagcgcgcaattggccgccttttaaaagaaggaaagatagaaattggtgaaaaaagcattgaaatccgtaacaaatagtttataataaggggcgaaggattgaaaattggaaaggagattggtagaagatgaaagtacagaacatcacagacgtagataaattttttaaggtagttgaccagtgcaaaggcagggtcgagttagtaacaggcgagggcgacaggctgaacttaaagtccaaactgtcccagtacgtgtctatggcgaatattttctctaatggagagattccggagttagagattattgcatatgagaaggaagatattgacaaactggtgaactttatgatcaacggccagtaacaggccggggcttgacgatgatataagcagatagcagaaatgattactgccaatggaggattatccattggcagtttttttgtccggtttttagattcacgtgtaagaaaaaggaacttccccaaaacaaggttttttggtatagtataaaaatacaggacagtcaacgatgtttacagatagaaagtgggaagggatatgagttttgcacatcttcacgttcatacagagtacagtctgctggacggttccaacaaaattaaagaatgtgtttccagagtcaaggaactgggaatggacagcgtagcgatcacggatcatggcgtcatgttcggcgttattgatttttacagggctgccaaggccgtcggcatcaagccgatcctgggctgcgaagtctatgtggcgccaggctccaggtttgataaagaagcagtaggaagcggggacaacaggtattaccatctggttcttcttgcggagaatgatctgggctatcacaatctgatgaagatcgtatcccggggatttaccgagggatattattataagcctcgtgtggatatggagatccttaaggagttccaccaaggcatcattgccctcagcgcctgtctcgcgggagaggtacagaagaatattgtccgcgggatgtatgaagagggaaaagcagcggcattaagatatcaggagatattcggggagggaaatttcttcctggaattgcaggatcacgggatccaggaacaaaaattggtgaaccagtcgctgcttaggatggcgaaggagacgcagattggactggtggccaccaatgacgtccactatacttacgcggaggacgagaaggcccatgatatccttctgtgcatccagaccggcaagaaggtggcggatgaagaccgtatgcgctatgagggcggccagtactatatcaagtcggaagaagaaatgaaaacactcttcccttatgccctggaggcccttgagaatacgcagaagattgcggaccgctgcaatgtagagatcgaattcggcgtgaccaagctgccgaaatacgatgtcccggaaggctatacttcctgggaatatctgaataaattatgctatgacggattaaaggagcgttatccggacggggaggaatccttgaaagagcggctggagtacgaattatccgtaatcaagtccatgggatatgtggattatttcctgatcgtgtgggactttatcaaatatgccagggatcatgacatcatggtaggtccgggaagggggtcggcggcgggcagcatcgtatcgtatacccttggaattaccagtatcgacccaattaagtaccagctgctgtttgagcgtttcctgaatccggaacgcgtatccatgcccgatattgacgtggacttctgcttcgagcgcaggcaggaggtcatcgactatgtagtggaaaaatacggatccgaccgggtggtacagatcgtcacctttggtactatggctgccagaggcgttataagggacgtaggaagggttatggatctgccttacgcattcgtggacggtattgcgaaaatggtgcctacagagttgaatattacgcttgagcgggcactgacggttaacccggaatttaaaagaatgtaccaggaggatgagcaggtcagggaattgattgatatgtctaagaggctggaaggacttcccaggcatacatccatgcatgcggccggggtagtcatcagccagaaggcgatcgatgagtatgtgcccctgtctttgggatctgacggctctgtcaccacccagtttaccatgactacgctggaagaactggggctgcttaagatggacttcctggggcttcggacgctgaccgtgattcaggatgcggtcaagctggcaagccggtcctctggcaaagacattaatatggaacagatcgactataatgataaggcagtgctggactccataggaacagggcgtacggatggcatattccagctggaaagcggcgggatgaagagtttcatgaaggaactaaagccgcagaacctggaggatatcattgccggcatctccttataccgtccgggcccgatggatttcataccgcagtatatcaagggcaagaaccatacggataacatcacttatgactgcccccagctggagccgattcttgcccctacctatggctgcatcgtctaccaggagcaggtcatgcagattgtgcgggatctggcaggatacacgctgggacgaagcgacctgctgcggcgcgccatgtccaagaaaaagggcgatgtcatgaagaaggagcgccagagtttcgtgtacggcaatgaggccgaaggggttcccggctgcatcgccaatggaattgatgaaaagactgccaataagatctatgatgagatgattgatttcgccaaatatgcttttaataaatcccatgcggccgcctatgcggtggtatcctatcagacggcatggctgaagtattactatccggtggagttcatggcggctcttatgacatccgtcattgaaaatccggggaaagtatcagaatatatctatacctgccgccagatgggaattgagatcctgcccccagacattaacaagggagagggaagcttctccgtagataacggcaatattcactatggactggccgccatcaagagcatcggcaagccggtcatccaggcgatattgacagaacgggaggccagaggggaattcaagaatatgaaggatttcatcgaacgtctctctggaaaagaggtcaacaagcgtacgatcgaaagttttatcaagtcaggcgcatttgacagcctgggtgggaccaggaagcagtttatggtcatctacgtgcagattctggatcaggttaaccaggaaaggaaatattccatgaccggacagatgtctctgttcgatatggtggatgaggatcagaaggcagagtttgacataccgcttccagatgtgggagagtacgagaaggagacgaagctggcatttgaaaaagaagtgctgggcgtgtatcttagcggccatcccatggaagaatatgaagagaagtggcgaaagagcatatccaagactaccctggatttccagctggtagaagataccgggcacaccaaggtttcagacggcgccagggaaattattggaggaatgatcaccgataagaccatcaaatatacgaagaataataaagtaatggcatttgtgaccttggaagacatgttggggtcggtcgaagtggtggtatttccaaaggattatgagaagaatcagcagtacctgaatgaggacagcaaagtattcattaagggtcgggtatccgaggaagacgatgcccccagcaagctgatctgcgagtcggtgattccctttgagcagacgaagcgggaaatatggcttcagtatggcagcaaagaagaatatctggcggaagaagcacagcttctggatctgatcaaggactctgacgggcaggatgcggtggtcatctactgtcggaaagagaaggcggtaaaacgactcggggccggtcggagcgtaagcgcggatgcccgtctgttaagcagattgacgaattatctgggggaatcttgtgtaaaagttatagaaaaacccattgaaaacattcgttaattcatgtacaatgtagcacgaggatagtaaggaattaagaagaacgctaatacaatggaggaattaagatggcagagaaaataattcgtacgataggcgtattgacaagcggtggggacgcgccgggaatgaatgcggcaattcgtgcggtagtcaggacggcattaggaaaaggactgaaagtaagaggcatcaggagaggataccagggccttttgaatgaagagattattgacctgtcagccagagatgtatccgacaccatccagcgcggcggcacgatccttcagacagcgcgctgcgacgagatgcgcacagaagaaggacagcagaaggcggcggctatctgtaagaaatatggaattgacgggcttgtagtaatcggaggagacggttcctttaagggtgcccagaaactggcaaacctgggaatcaatacaattggcttgccgggaaccatcgatcttgacattgcctgtacagaatatacgattggatttgacacggcagtgaatacggcaatggaagcgattgacaaggtacgcgacacctctacttcccatgaaagatgctcaatcatcgaggttatgggaagagatgccggatatctggcactgtggtgcggcattgccaacggtgcggagcgtatcctgatgccggaagagcatgactataacgaagaggcaatcgttgctgacattcaggaatgccggaagcgtggaaagaagaactatatcatcatcaatgcagaaggcattggcgattccatgaacatggcgaagagaatcgaagaggcgacgggcatggagacaagggcaacagtgcttggacacatgcagcgaggcggaagccctacctgcaaggacagagtctatgcatccatcatgggagcgctggcggtggatctgcttgaacaaggaaagacgaaccgcgtggtgggatacaagcatggagaatacgttgattttgacatcgacgaggcactgggcatgcagaaaggaattccggcataccagtatgagatagcaaaggaacttgcattataggaactctatgaggcaagaaaaaggcattggatgaagaaaaatccaatgcctttttaaatatacaggaacacacataaacccgctttggggaaattactcttgaaaacagcagggattgacgttacaatgagtattacgaatggttttaaaggagataataattgtggagaataatagagaaaatacagcgccggtaggagtttttgactctggcgtgggagggctgacggtagcgcgggaaatcatgcgccagcttcctatggagaatgtggtgtattttggagatacggcaagagttccctatggaagcaagtccagagataatattatccggttctccaggcagattattcgcttcctggagacgaagaatgttaaggcaatcgtgattgcctgcaatacggcaagcgcccttgcgctcgacacggtgcagaaggagacggatgtaccggtgatcggagtgatagggccgggagccagagcagctgtcaaggagacaaggaacggccagattggcgtggtggggacggaggcgaccatacagagcgagacttataccaaagtgatacatagcctgaatccggaagcatccgttatcggaaagccatgcccgcttttcgtgccgcttgtggaagaggggtttgcaaagcacaagattacggaagaggccattgatttctatctgtcggatatgaagtcaacgcagattgacacgatgattctgggatgtacccactatccactgcttcgctccaagatcatggcttacttcggagaagagatccatatcgtgaatcccgcctatgagacagctatggacctgaaggccgcgctgaatgactgcggcattgccaatcagtcaggcatacccgcgacctatgagttctatgtaagcgacgccgcccagaagtttacgaagttcgccaattccatcctgccatatgatgtagcgacgacgaagcagattaacattgaggaatactaggagagcctatgacaaaggatgtattacttagcatatccggcctacattacgatgtggccggagtaacggaagaagatgagaatgagccgatcgaagttattacgcctgcggcgtattacttcaagaacggcaagcattatgtgatctatgacgaagtggtggaagggatgcccggtacgattaagaataagatccgcattgccgaggacggcaaactggaaatcatgaaaagcgggcttgccaacacccatatggtctttgaaaaaggcaagatcaatatgacggagtatgagacgccgtacggagaacttctggtgggaatccatacaaaggaaatgacggtaaagtcggaggaaaaaatcatagatgtccatgtgaattacgaattggatgtcaatggagagatggtggcagactgcaatatcgagatgaatataaaagcattggaccggtaagatccaatgctttttatgtggcttgtccttatttgtttcttaatcttgcgaagaagcctttcttcttctgaggagtctctaatggccctcttaatcctttgaccgcggtaatataaataccgcttacggtagcctttacttccttcttgacgggaatcaatgggaatacctgagcatcgcacatcaatgtcattaccttcgggcctaccttagcctttactacaggaactttagagcggcgcagatactttggcgtaccttctacgacaatacttgggaacccggcttccttaagcctcatcttgcctttatcaatgataagcatggacacggtctgtgcgacggcagccagctgctcctgctgttcggcctgctttttctctgctctttttcctaagaaatacaatacgatgcaagcaatgattaaaacgactaaaataacaagcaatacaatcgttaacgtcttcacggcgaacctcctaaaaatctattttacacgaactacattgtaccattctttgaacgcaagtgcaagagatttgagattttggggttacttttccggcaagaaacggtataatagataaaataacgagatttttaaggagagtagcatgcttcatactgtgacggagggaattggaaccgtatactggtggatacttgaccatctgtttcttattaacatcatatttgcgctgctgatcatattttttcagcggaggaatcctacgacggtgtgggcgtggcttttgctgctttactttataccggtgctgggatttgtgctgtatctggtgctggggcagaatttccgcaaggaccggatgttcaagatgaaggagattgaaggagagatcaaatatgctgtccggcggcaggaggaatctatctatcgtaagaaattaaggcttcgggatcccgagcttgagcggttcaaaagcctgatcttatataacctgaacgaaggagaagcagtactgacggataataacgatatcagaatttatacagatggacgggagaagtttaatgcactgcttacggagatggagcatgcgagaaactacatccatctgcaatactatattatccgtaatgatgaactgtggcaggagatagaagaagtgctggtcaggaaggcgaggcagggagtcgaagtccgggtgctgtttgacagcatgggatgtagagggatgcgtaactcggtctggatgcgccttgagaaagcaggcatcgaggtggcggaattctttccggcgatcttcggccagctccagttacgcgtgaattaccggaaccacaggaagatcgtggttatagatggaagaatcgggttcgtgggcggattcaatattggaagagagtatgtggggaaggataagaagttcggatactggcgggatactcacatctgcatcgaaggctcggcagtcacttccctggcagtacggtttgtgctggactggaattacgcggctaaggaaaatctgtttctggaggatcggatttttgagattcctacgtatatccggaacgggcgcgaccctattcagatcatatcaagcggcccggattccagaagccaggagattcgtgacaattatctgagactgattcatatggcaaggaaaagcatctacattcagactccgtatttcataccggatgatgatattgcggatgccctggtaattgcagccaagtctggaatcgacgtgcgcatcatgattccctgcaagccggatcatccgttcgtatactgggcaacctactcttatctgggcgagatgatcgaggcaggagcaagatgctacacttatgacaatggattcctccatgccaagtgcatgtgcgtggatggactggtcagctgcatgggaactgccaatatggacatccgcagcttcagcctgaattttgaagtcaatgcggtgatctatagcgccaggacgacggaaaagttgatggaggcatttgagaacgatattaccaagagcactctggtgacaagaaagaagtatgagcagcgcaatctgctcattcgaatcaaagaacagttctgcaggctgctctcccctgtgctgtaaccggcagggcagattcttaataaagagtgaaatatgtgtgaaaatgctttgaaagttctgttaaatgtgctataacataatagtgtgatttaacggaaagtataataagaggtgtaaaatgaagaagaaaattgtagtgctattaacaggaatacttgctgcatccatgatgctggcaggctgcgaagggagcaagggactggagacagacagcctgaatatatcccaatataaaggagtagaagttgatcaagtcagcaagccggacgagattacggataaagacgtggaagatgcaatccaggcaacgcttcagaccaatgcaaccactaatgatatcacagaccgggcggtgaagtccggggacacggtgaatattgacttcgtaggaaagattgacggagtagaatttgaaggcggatcgggaacagactaccctctgaccataggttccggccagtttattgagggatttgaggacagcgttgtggaccataacatcggagatacctatgactgggagggcaagttcccggataattacaataaaacggaatatgcagggaagccggtagtatttaccattacggtgaagtccatcagcgagcaggtggtgccggaactgaacgatgagtttgtaaagacggtttctgagaaatcaaagaatgtaaaagagtataagaaggaagtaaaaaagcagctggaagatgatgcccagaccacttacaaggatacgctgacccagaaggtatggcaaaaagttttggacaacacgaaggtgaagaagtatccgaagaaaaaggtaaaagaaatctctgattccctggtcgagcagtataaaacggcagcggagtattatcagacagattacgagacattccttaaggagcagatgggaagttcagtagaagatttcgaggcccaggtggacgaagcagccaaatcaagtgtcaagcagcagctggtgacggatgccatcgcggacaaagaaaagatcaaaatggatgataaagagtacgagaagcagttgaagaagattgcggacgcgtacggatatgaagatatcaaagcagttaaggaagcagcatccgaggaagatctaaaagagattgcactgaataacatggtgaaagaatggctgacagagcactgcgtgcaggttgcttcaaaataagccgctggtagtttcaggaagtaaagacatataaagaccccttgcatagactaaagaaatcggctatgcaagggttttttgcgaggagaaagggctttcctatagaacaaaacgattggagagagatgatgtcgagagggaatgaaaaagggagagatgagtttcgcaccaggctgggatttatcgtggcctgcatcggatctgcggtaggcatgggaaacatctggatgtttccatatcgaaccggcaaatttggcggcgcggcattcttaatcccgtattttatatttgtaatcctgctgggattttccggcgtgatcggggagatggcgtttggcaggagcatgaagacagggcctttgggggccttttccaatgcgatggggatgcgatttggagaaaagggaaagaagtgggggaaggccatcgggatgataccggtgattggctcccttggcattgccattgggtattctgtcgtggtggggtggtttttaaagtatctaagcagcgcggttaccggaagcctgacgaagatcgaagatatgggggcctattttggagggctggcggtagattttggaagcgtgggatggcagatgctgggcctggcgcttaccttcctggtcatggccttaggagtaacgaagggaatcgagaagatgaacaaggttatgatgcccgtattcttcttgttcttcattatccttctgtttcgggtggcaactttgccgggcgcggcggaagggtaccgctatatgttcgtacccaaatgggagcagctgggggatatcaagacctgggtatatgccctgggacaggccttcttctccctgtcgctggcaggatccggcacgattgtgtatggaagttacttaaagaaagatgtggacgtcgtcagctgcgcgaagaacgtggccttctttgatacctgtgccgcgcttctggcgggcgtggtggtgataccggcagtatttgcgttcggactggatgttgccagcggccctccgctgatgttcatttcccttccggcagtgttccagcagatgccatttggcgaggtgtttgccgtaatcttcttcgtggctgtgctctttgcggctctgacttcgctgatgaacctgttcgagacttctatcgaggcgttgcagcagcaagtcaaactgtcccggaaggcagcggtggccattgttgcggcagtatccgcgggagtgggtgtcttcattgagagcggggactccgtaggcgcgtggatggatgcggtatcgatctacatcattccgcttggcgcgcttcttgcgggaatcatcttctactgggtatgtccgaagggatttgcgagagagcaggtggagaccggggcgaaaaagcctctgggaaaatggttcgagccggtgacgaagtatgtattcgtagggattaccctggtggtgtatgtgcttggaatcttctttggaggaatcggatagagcaagaaatgcaatatcctgcggcagattgcccttagggcatgccgcaggatattttttatatatggaaatcatctaaacgctgttattttatatggctcttatgctcgaggagtttatgatgagttttcggatgttgacattatgattcttcttaatctggatgagatggaacttaagaaatatcgacagcagttgtcagagataacatttgactttaatatggagcatgatatagatattaagccgatcgcaaaaagcaaggaactatttttaaaatggcaggagtcttatccattttataaaaatgttagtcgagaaggggtgacgctatatcgtgcagcatgtttataataccggaaaaaagaagatttaaaatcggcgaaagcactgtttgaaattcctgaatacagaggagccaataatagagcatattatgcaatatatcatattatatcggcaatccatgtattggatgaggtggactgcaatcgacataatgatacaatagtcaattttatataaaaacagaatatcaaaatgtaaaaagtaaccatcaattgattccggtagtttttcttggatgacaaaagagaagattaaacagatactctaaattgcgaataagctttctgatccctgcatagattgtaaaaaacaaactatgcaggggttattgatatgaaggattatattgaggagagggcagtagaaatagcatattatatcattgagcacaaagccactgtaaggcagacagccaaggcgttcggagttagcaagtctaccatacatatagatgtaacaaaagaggtgtttttgtgaaggttgtttatgaggtgaggtgaagataaaacggatagtgtgtataagatgtataaggagaaagaaatagtttcgatagaatctgattcatgatgaaaaagctcggtgatgaccgggcttttttaaaacgattgtttatttgttgttttttatgaactatactataatttaagcatgatgaaatcagaggtaagcataatgaaatataaaattttaatggttgatgatgatagagaattgctaaaaatgctgaatcaatactttacattgaagaattatacggtgattattgcagaaaatggcatagaagcaatagaaaagataagtacaaatcccgatattattttattggatgtaaatatgccgggaatggatggaattgaagtgtgcagaagaatcagagatatggtttcctgtccgattatttttttgactgcaaaagtagaagaacaggatcgagtaatgggcttgttgtctggtggtgatgactatgttttaaaaccattcagtttgaaagaattggatgccagaattattgcccatttgaaacgtgaagaacgtttacatagaaagaaagaacaacgattttatggagaattagtaattgactatgccagtaaatgtgtacatattaaagggaatgctttagagcttactaaattagaatatgagattatagaatttttatccatgaatcctgaaatggtttttgataaagaacgtatttatgaaaagattagtggatatgacacagaaggagatagtcgagtagtgactgaactaatccgtagaatccgtaataaaataaaacgatatacagaacatgaatatatcgaaacgatatgggggatgggatataaatggagaaaataaaaaatctttcgttgagaaaaaccatttttttgtatatgacaattagtttgatcgtttgtttttatctttcggcattggttatgcgaacggcatccactgtacaaaataatatttggtggaagtatgtagaccaggaaaaatactttgaaatagcagaaagcaagtggggagaatatttaactgacattccgagaccaaacgcacataaaatggaaaagtttgattatcatgtatcggagctttgtgactttcttcagacatttgcagtacttatcgtgtctgtggcaggcaacatcatagcggtatttcttttttataaacataaattaaaagatcctattgaagaattagaattggcatcacaacaagttggtcgaaacaatttggagtttcatattacctatgaaaataaggatgaaatgggaagattgtgtgaggaatttgaacgtatgagagaacagcttgcagagaataatcgtcagttatggaaaatgattgaggacgagaaggctttacgggctgctattgcacatgatatacgttctccgctatctgtattggaagggtatcaggaaatgctttcagaataccttcctgaagaagagattgatataaaccaagccgtagaaatggtaaatgagagcagaaaacagatcaggcgcatggatacatttgtagaaaccatgcggaagatgaacagtttagatacaagagagtttgtggtagaagaaattacaagtaagcagttaaaagtagatatacgggcggagttggatgtgtttgagaaaaaatctggaaagcaatgcgaattagaatgtgtggaaacagcagaaaaatttttgggagataaggaagtgattttagaggttatagaaaatcttttgtcaaatgccgttcgttatgccaaaacaaaagtgaaaatggaagttctccttacttgttctgaattacaaatcagggtaaaggatgatggggttggttttacagtagacaagcaaaaggcaacagagcttttttatcaacaaaatgtgaaagacagtttgaaacattcaggaatgggcatgtatatcagtagattgtattgtgaaaagcatggcggacagttactaatagaaaatgaaaaacagagtggagctgtaataacagcagtatttcatcggattgcataagcagtccgatttttttatactgttgtctttttgttgtgatttatattttatgatgtctataacaaggaaaggaggcaaatgtatgattgctatttttaaaagagagattcaaaactatttaaagcgaccgctattttgggtggggattgtgcttgtgatttatggtgtgtttagtgcaaccagttcctatctgaccacacattatcttgcaacgggggagaaaatcatcaatgatcagtccaacacttcggttgaaggagaagtgtatgaggggtatattccagctgacacagaaaagcatcgggaactatggcatgaaaaagtaaaaataaaattgacagatgtgtttgatgtatcggctatagaagcacagacagtaattgaaaagctagaaaacatgaatttaaaagaagcctatgcgtacctggaacaggaatatgactggtacggggcaagatatttgtatgaggacagtacgtattataagggaacggcagaagaagttaatgcgtatctggataaaaagctagaaaataagtcattttctttttattacgcaagaaaatttgctgattttgcaggattgtatatggcattttttgcaactattatgttggcggttttatttttacaagatacaaaaaagtatacttatgaactgttacacacaaagcccgtgactgctgggaagtatataatggggaaagtgagtgcaggatttacaatttgtttgcttgtgctgactattttgaatatactgttttgggtattgtgccacatctatacaaaggatagtggatttgaagtgcgactatgggattttgtggcttctacggtactttatatactgcctaatatgctgatgattgtgagtatatatacattgatttcactcttatttaaaaatccacttccgggagtgccacttctgattctttacatggtatattccaatctgggtgggagaaatgcagaaggagtttatgggtattggggaagacctttggcaattatggttcgatttcccggacagctttttgatacggcaccgccgccaatggcactcttaaatcagagtgttcttattttagcatctgtagtaattattttattttcgatacagctttggaagaggaggcggatgtaagtgaagaaagaaatgaaggttgtcctgtcgttttacaagattgcttatgcattgtcctttgttgtaattttaagtttgatccgtggcgttatatttacaaatgaaataggactttccattgaggcaccttttgctatattgactgctgttttttgtgcggacacttatgtgcaggaaattacaagcaagcgatcagaaatccataggctgtatccaataagaaagagaatttgctccatcatgcagcgaataatgatacaggaattttttttattactgcttgctgttttaggttacggattgttttttgtgtttcaaaaaccagtcacacatccggcaacggacagtgaaatacttcagtttattgcctattttttagcgattgtagtaaccattttcttttggggaatattggtcaatacattgtctatgctttttcgcaatatgtggatggggattggaagctgccttctgatatgggtagcaacaaattccacgggaggagataaactttttggggcatggaatctattttcctatgcatttagagatatagaaaatactgatgatattgcatggctgtatgggaaagttttgtgtatttgtataggattcgttttattaatagcattgcctaagatagttagaaagagagggtaagtttatgagtattcatattgaggatttaacggtaagatttaagaatggtgtaacagcaatcaatcatgcagatttggatatacctaatggaatatttggattgttgggagaaaatggagcgggaaagacaactttgatgagggttttaactactgtacttaaacctacaagcggaacggtcacattggacgggattttatatagtgaaggaaattatgaaaaaatccagagaaaaatagggtatctgccacaggaaattgatctttacccgaatttgactgttcaggagtgtttagagtatatgggtgatttggcaggtgttccaaaagcagagtgcaagaaacgaatagaatattatttgaaaaagaccagtcttgcagaacaccggaaaaagaaaatgaaacagttgtcaggcggtatgaaacgacgggtaggattggtgcaggcgcttttaaatgaaccggaatttctaattgtggatgagccgactaccggtttagatccagaggaacgtattcgcatccgcaatttgttagtagatttttctgaaaacagaacggttttgttttcaactcatgtggtggaagatttggctgctacctgtaaccaacttgcgattatgcacaaaggtagtttcttatatgcgggttctatgaaagacttgtcagaagaagcacaagggaaaatctggatttgcaaagtgcctgatgaaaataaggcaagagatatagaacgtaagtatcgcattacgtcaaaacaatatgttgaaggaggattacaactaagagtgatttccgaaacacttccagagttggaatgtatgtctgttccggcaacattggaggatgcatatatttattttacaaataaatataataagtaatgatacattcagtttgtttaactgagaaaatactgtaaaagaatatgtaaaatgaaatataaaacatctactgagtaggttgaactcaatactcctatgatttcgattttgaagtcataggggtttttttgtgcagaaaaataaaaaattaccttttccaccctgtattttcccctctgagcctttcgttatatgaggacaaaaaaataaaattcattttttatttgtaaaaagccctctctacgttctgatatatgaggaacaaattacatttgccttaaaagaatcgggccagattcaagaacaaacaaaaaacgaaaagagaaaggagaaagtacatgaacagaacaatcttaatgggaagactgacgaaagatccggaggtgaaatatctccaggatgaaaacagtactgcaatggcacgatacacgctggcagtagacagacgatatcgaaaggatggaaaggcagaaacagattttatttcctgtgtcacttttggaaagaatgctgagtttgcagaaaaatatttgaaaaagggtttgaagattttagtgagcggacggatccagactggaatctatgtgaatcaggaggggaataaagtttatgccaccaacgtgatcgtagaagaacattatttcgcagaagggaagaaactgtcagggttagaaaagaaagaagataccgatccggatggatttatgcatcttccagatggagaagaacttccgtttgagtaagaaaaactcggatgctgaaagcagaagagcgcacttatataccttacaaggtatgtgcgtcctacggagtttgcatctttctgaaggggaattccgaaagtgtttgcggatgatccatccgaagaagggttccccttccggcagaaatgcctatcccgtaacagagaaaattgaagagttgaaaaaggagaaaaagaacgatatggcaaagaagaaaacatttcaggaatatactcaggaagcacttcttgagattgaaaaaacagaagctgcattgaaacaggcaaagcttgagaaggaacaggcagagcataggatccagaaatccttgaactatctagatacacagaaaaagaaaaaacgaaaggcacgaacccatctgttgattcagaaaggagcagccatagaagcaatctgtaaagataccaaatatctgacagaggcagaattttatcagctgatggatgaacttcttcatgatcccgcttataagttttgtgatgtcgttcatgaaatggttcgtggacgggcggaagcggcagaagcaaaggaacgagaattcgcggaagaagaagcactattaaaggcaatgcaacgaggcgaactgccacagggagatgagtaagatgggatgttatcactttcatctgaatcaattatctagaggaaaagggcagtctgccattgccagtgctgcttaccgagccggtacaaaactggaatgtacgtattatggagaagtaagtgattatacgagaaaaggcggtgtggtattagcggagatccatcttcccaaacaggctccggagagattcaaagacagggagatcctttggaatgaggtggaatggatcgaagggaataagaaagcacagctggcacacagctttgatattgccttgatgaatgagttttctatggaagaaaatattgagcttgcaagaagatttgtggaagaacagttagtcgcaagagggatgatcgcagatctagcgatccatgatccgaagaaggcaaaggataaaatccccaatccccatatgcacatcatggttcccatccgccctttacaggaagatggtacctggggacaaaaacaaaaaaagattccagtattaacaccggatggacagccggttttgaatcagaaaggacaaccggtatttcgggcggtacatacaacggattggagcaggaaagaaaccttggaagaattgagaagtgcctgggcgaagatgtgcaacgaactgtatgaagaaaaaggacttatagaaagagtcgatgccagatcttatgaggaacgggggattgataagatcccgatggtgcatgagggaccgaatgtacaggcaatggaagcaagaggaatttcaaccgcactgggaagtttaaacagactcatccgagccttaaatgatatgaaagaacgggcaaagaatcttcttcaatggtctttgcttcgacaaagccagttgatggaacggatgctgttcttacatcagcccactttagcggattatctaagaaactattatgacaagagaaatgcagttgcagaatcctacgcttatggaacacaaaaggcgaagaatgcaaatctgaaacaatttgcagagacgatccgctttctggaagagcaggatgtgagaaccccagaacagctgacagagaaaatccaggaattagatactcagctaaaagaggtaagtcagcggttgaatcaacaactgtctgctctgcgaagtatcaacagcaacctttatgcaatgaaagagtattttgaaacgagacctgtttatctggaattaaagaagaaatattttggcaggggaaaattcaaggaggaacataagaaagaacttagcggatattatcgttcggaaagaatcttaaaagaaaatctagacccaagtgggaagatcccggaaggacaatggaaacgagaagccgctagtttatcagaagagatagctgctttacgaaaagaagataaacggatccatgcgatgttacgaaagtatgaggggatcaaaaatcatgtggaagctttgatggcagaggaaggcgaaggtgtctctcttccagaaacaaacaagcgggagcaatccacagaaacaaaagaggcagtgagaaccatgaaacgaaagaagaaacatcatggaatggaattataggaggaattttagaagatggaagaatatacaagagaacaaatccaaagagcagatgataccgatttatatgtttttctttctgggagaggagaacagttcaaacgatgtgggaaggaataccgatggttgcgacatgacagtgtgatgatcaacaagaacgaatggtatcgttttagtcagaataaaggcggtcatgccattgattttatgaaagaattctacggtctttcttttgcagaggcagttaaagaattattaggagaagaggaagttggagaaacaaacagaagaacggcgaaggaagatgcaggcagacagaaggtctgccccatccccttgcctggattggaactgccagaaagaaatgaaagctgtgagattgcaaggaagtatctcattgaacagagaaaactatcggaacaactggtagatcagatgattgaaaaaggggatatttatgaaagtaaaaactatcacaatgtggtgttcgttggaagagataaagaacagaatcccagatatgcagctatgcggggaaccgatgagaaccgatatcgtggggatgcaagaggttcagaaaaaacctatggatttggccatataggaacggatgaaaaactgtttgtgtttgaatctcccattgatcttttgtcttatatcaccgcagttccggaagaatgggaaaagcatagttatatttccctaggaggattgagtgaaaaagcaatgaaacggatgtatacagaatatcctcatatccattccatctacttgtgtctggatagtgatgagcctggaaatgagagatgcaggcagtttgtttctcttattccggaggaactgagtgtgtaccgattagaaccggcgaagaaagactggaatgaatgtctggtagcagaagttccggtagaaaatatggcaaagccgatgtgttggagagatgccagggaaaaaccagttccggtcatgaagatgtcggaggttgaggaaacggtggtccagtggctatggtatccgttcattccctttggaaaggttactttgatccagggaaatccgggaaaaggaaaaacatggcttgcaatggcaatcgccgcatactgtacgaatggaaaagaacttcccaatgcacttcccatagaaccctttaatgtgttgtatcaaacagcggaggatgggatagcagataccattaaacccagattagcaaaatgtggtgcagatatgacaagagtacgcttcatcaatgaagatgaaaaacagctttctatgacggacgatcggattgaaaaagccatccgccagaacaatgtacgcctcatgatcatggatcccatacaggcctatctgggagccaatgtggatatgaaccgggccaatgagatacggccattattccggcatctcagtacgattgcagagagaactggatgtgccattgttctcattggacatttgaataagtcgtcgggaagtcagagcgattaccgttccctaggatccattgatatcgcagcggcagtacgaagcatcttgtttgtagaaaaggtggaaaaagagaaggaacaggatatccgagtggtatatcagcaaaaggattctcttgctaagaaggaaaatccggtagcgttttctttaggagaagaaggcttaaaatggttaggagaatacgatatatccattgaagatctgctgatggggaaagcaggaacgaaaaaggaaacgaaactggaaaaggcacagaagttgatcctggagttattaaccaaacgaaaagtgatgtgtttagaagaattagaggcagaactactagcctatgggatttcttccagaacaggaagagatgcaagaaagcagctggaaaacagattgagctacgactggtgtcagggaagaaaaacagttgcgttaatcatagaataaaagatgacattggcaaaaaactactttggcattggcagtctttatagatacctttgccagccgccaatgtcagagtagttacgaataaatgatagttaaggtctattttaataggtattttcatagtaatggacaaagagaaaagggaggtgggagcaccgctatgaagaaacaaaaactgaattatcgttttcataatccgaatactgcggaagtgaccgccgattacatgttaaaagtatttattgaggtgaatgcgaagaaggttgaacgagttatgcaggaggtagctgagaatagtgcggaagaggacaagcgggaagcaaaataaaattctctattcttaacgatgaaaaatgcagaaaaagaaattacaaagcaatatatgagaggaaatctcaaatatagtttacaaaaactaaaaatagagtataataaagagtagataagataaaatctgaaatggaggtaacgatatgttatgtcaatttacagttaagaattttaaaagtatacgagatgagatgacttttgatatgcaggcggcggctatttcggagcatgaagataaagtgataatggataaaaatggagagcagtttttgccggtttctgcaatatatggtccaaatggtggtggaaaatcaaatgtcttggaagcattgcatactgtggcagcaaaagtgttacgcccgttgtatgcaacaggagataacgaggaacgtgtttttcttcagaaaaaattattgattgagccttttgcattttcggaagaaatgaaaaatgaaccgacagaatttgaagttttcttccgaacagaacttgcagagtatagatatatacttcatgtgaaaagagagattgttgtatatgagtgcctcgatcgtgtgaaattggagacgggaagacgttcagctctttttgagcgaaatgcagaggaaacaatattaaagggtgtgtttgcaaaattaaagattagtgacgaactttctgaaacattgccattattatcttatttaggaattacctataagaaaaatgaggtggtaaaagacgttttagaatggtttgaatacggcattgatttcctaaactatgggaatccgattgaagaacttcgtatggcagtatcaaattcagaggatgtaaagcagttaatgttggatatgattcaggaaatggatttggatatttgggatttccgagttgtgaaaaatgaaaacgatcgaattgatgtgtatacaaaacatatggtagagggatatgaagcagaactaaatttgtttgatgaatccagcggtacaaagaaattgtttgggttaatgccatttattgctgatagcttattatcaggagcaacactggtaattgatgaactagatgcaaaaatccatccggtgttattacgtcatataattatgatgttcaatgacatgagtatcaataagaaaaaggcacagctgatttttacatctcatgatttatctacaatgaatagtgaggtatttcgcagggatgaaatctggtttgtggcgaaaggaaatgcacagaattctcaattatattctcttgtagagtttaaaaatgagaagggcgagtctgttcgtaaagatgccaaatttgataaacagtatcttaaaggtaagtatggtgcagatccatacctcagaagaattatagattgggggaaggttaatgcctaagaaagccagaacagaagtgtggagaaagaagcgccgccaagagcatttgaaaatgaaaaaatacagatattacattttctgtgaaggttaggaaacggaatcgaattatttccaagggttcaaaaaatggattaaagaaaatacgatttacaaagatagggttgacaatgcaaaaagagcattataatataataaataatattatattataatatttttcgttcggagggcaattatgagaaaagaaatgcagaactataagaagaatccacttaatttagtaaatgaatttattaatcaaacaggtcttagtgatacaagaatgacaattaattctaaaacaggaacagttagcattactggaagaaaagacggatatcaatatacgacaacgatgcaacaggaaaagcatggaaatattataagaaattcatcatttgaagttaatgttggaaaagaggctttaatagagcagataaaagaattacgaagtgaagggtataaacagctagaaattgcagaaatgcttggaatttctcagtctttagtttccaaatatttaagaatgtaggattatcaaaataggagaacaaggattcgcaaggatttatgaaacagaagaaaaagaagggaatggttgagagtagataacttgacaatattgaagaaagattaatgatattttaggaggaaataattttgataaaaagtataaaacttattaattggaaaagttatgaagatagtacgttatatattgatccgttaacaattttaattggtatgaattcaagcggaaaatcaaatgcaatagatgcgttgatattcttaagtagaatatccagtggcgttggaatctttcaagcaataagtggagatattgcaatgagtgcactgcgaggaggcgctgattgggtatgcagagaaaatacaaatcaattttcactagaagtacttatggaatacgacaatatggagtatgaatattcaattaaagtagaagtaggaaacactaaagcattgattgtagaagaaaaattgaatcagagatcttcaaacacgaaaatgtctcgattattttatacaagtttaagagatgaaaaactgctaaatattccaacatatttttggacaggaaagcaaggaaaggggcagaattttgaattaaataggaacacatcaatattatttcagagtaagtctttgcaattaagaaagaaagaaattatagaaattaccaaaaatttatcccagattttagcgggtatatttgtacttgatccaattcctaatcatatgcgagactattcacaattgtcagaaaaattaaagacagatggatctaatattgcgggcgttttagctgcattggattctgaaaagaaaaaagagatagagaataagttgacgtcttatttgaaagaaataccagaaaaggatatagaaaaagtttgggcagagcggattgggaaatttaatacagatgcaatgctttattgcaaagaaggatggaaagaagatagtgaatgcattgttgatgcaagaggaatgtctgatggtactttgagatttttagcaatagttgtagcgatgcttactaatgatacaaataaattaattgttgtcgaagaggttgataatggtttgcatccatcaagggctaaagtattattgaatatgttaaaggagcttggaaaagaaagaaatattgatgttgttattaccacacacaatccagcccttctagatgctgctggaacaacaatgattccattcatcacaattgcccatcgaggaaataaagggcagagtgaattgactctattggaagatattagtgaattaccgaaattgatttctattggaaatatcggggaattggcaacaaatgggaaaatagagtctgctctcactagggggataaatagatgaggaaagtactgataattgatacatgtattttgtgcgtttatttaggcgtaccggatatggatgattgtggaccggatgatgataaatggaattatgaaagagtatctaataaaatccaaacagagataagtaataatagtacattggtgctgccaatggctactttgattgaaaccggaaaccacattgcacaggctaacggtgagaaatttgatgtggcaaataggttatcagaaattataataaaagttgcaaatgaggaggaaccatgggcagcatttgcatttcaaagcaaattgtggaatgaagaaaaccttattaaacttgccaaaacgtggccaaaactagcggtccaaggaatttcaattggagatgcaacgattaaagatgtttcggaatattatgttgaatctggatataatgttgaaatattaactggggatcaaggattaaaggcatatgaaccttcagttgcgtctattccgagaaggcgaaaaaagtaaaagttaaaagtatagatatattgataaaattgtaaataatttgcaggagattagagagctcatatttcataatcttctgcatttttcagtttacgaatctttattttgatatataatatagatgtaacagaaaagaaatttaatacagagaggtaatcctatgaagatagcagcatattgccgtgtttccacagataaagccgaccagcttaacagcttagaggcacaaaaggaatttttttccgaatacactcagcgtaccggagatgtcttagtaaaattatatgcagatgaaggtatttctggaaccaaaatcaaaaaccgtaaggaatttctttgcatgatgtcggatgcagaaaaaggaatgtttgatatggtcgttgtaaaggatatttctcgttttgccagaaataccgtagatcttttacagaatgttcgcaagttgaaagcgttaggtattgaaacacagttccttacagcgaatatgacaagtatgggaaatagtgagtttgttctcaccatctttggagcattggctcaggaagaaagtgcgaatacgtctaagcgagtgaaatttggaaagaaactaaacgcagaaaaaggacgagttcctaacattgtgtacggatacgataaaacaatcggagactatttcaatcttgagatcaacaaagaagaatcaaaggttgtaaagcaaatttataagtggtacacagaagaaggctatggtgctgcaaagatttccaatatgctgaatgaaaaggggtatcggacaaagagaaattgcaaatggagccagaatgccatctgccggattttgaccaatgagatttatacgggaaagattatcaatggaaagcaggaaatcagtgattttctgactggtcagagaagagagaaggatgaaacggaatggcttgttgcggaacgtccagaacttcgtatgattgaagatgaggtgtttgaaaaagcacaggaaattcttcgcggaagaaacgatgcattcaatctgaatcatgagcgacaaagcaacaaatatttgttttctacattgattaaatgtaaagaatgtggatggtctttccgaagaacagttcgtacctacaaaaatacgtatgtgcgttgggtttgttccggaagaaatggaaaaggagcagatagttgtccaaataaaacagctgtagatgaagaagaattaattcaggttttacaggaatattttaatcgggttcttcagcaaaaaaataaagtaattgactatgttgtgaaagaattccaaagagtgtacaaagcaaaagatgaaaatgcagagtacgagaaggaattgaatttgcagattgccagattacagagaatgcgacagaaatatatggatatgtataccgatgatttgatttcaagagaagaattgaatgataagttgggtggtactcgtcaagaactggatcgtctggaaaatgaattgaaaatggtatctagcaatttgacaaaaggagatcagatggaaaaaatcttaaatgatacctttaagcagattgaggatattacagatgttcatgagatgacaaatgtacagttaaagagactgattaagaaaatagaagtagacaaagatggaaatgtggatatttaccttcgtttactaggtgatttgggattaaatgaaagcattttagtggaagacgaatgtgaaaataaaacagctctaaacagtaacgaccaaacataaggacgtaacggaacgcttattgaagattaatccgtctcttgctgccgaggcacgcaaggtgttggacatgaataagtcggaacggcacatccgaggaggcatggctaccagagagaagtatctgcatcagcatgggcaggatgcagtcggaacgagtatctgagaaggagtgggagattgcgcaaatctccttctttttttctgccctgctataagcacggaagaagcaatgccaggaaaaaatttgtccgctggcggtcaatatgttaaaatgtagggactactattggtgatagcgatactacaggaggaaaagacttgagggacaagataagattcctgtctgcggcattggcagcaatgctggcggtatccctggcggcggccggcattggcggctgcgggaaggaagaaaagataaagcagaatgaggagcagcagatagaactatggtattactgggatatggcttaccagcagaaagtgctgggggatctgattgatgaattcaaccattcccaggatgatatagaggtgaccaccagatatataccggacgcggattttaagaaggaacttgcgcttagcatgtatgagggaaccatgccggacattgcgctggtagattcggcagacttccaattcttccagcatacgcagtcctttgcggatctgacggatgagatcgaagggcttgaggactatctgccggaggcattggcgccatgcgaggaaggagggcggatcaaagggcttccatttggagtgaactgtgtcgccttattttataatgaagaaatgctggcaaagcgcggattaaatccgccggctacgtggcaggaattctacgatacggcaaaggcgctgacagcagatggagtctatgggtatgcccagccggccctggagagtgaagagagcatgtattcattccttccggtgctgtggtctatgggcggggatgtggactgcctgaactcccgggagagcgcctatgcattccaactgttccgggatcttaccgaagatggcgtcgtaagccggcagagcatcagcctgacccataaggatcttgcccagcagttcgcaaaaggcaatattgccatgatgatcggcaatcctatgcaggtggagtatatccgcaagatcaatcccgatcttgcgtttgatgttacggatatcccgtccatttccgataaggtgacggttctcgggggagagatcttcggagtgacggacggcaaaggaaaggacgcggcaatcgaattcctgaattatataagcgacaaggacaggatggccgggtatatggatgatttgggctatatggcggccagaaaggacattttagatggacagtttcaggaagacgcggttctgcataagttcatcggattgctttcctgcgcaagaaccagagaatttacctatcaatggccggatattacgagaacggtagtgtctgcccttgagcattctattatcggcgaggaagatgagcgcataatattagaggaagcggcggatagcatacagaagatcagggagggtggacaatgagaagagagatgacgcttagaagacgcctgctgccgatcttcatactggctaccggaatccccatcgtcctgtttgccctgatatcccaatacaggctgcgcagcagcctgaacgagaatatacagatgcagattgacaacaatctgaaccgggcggaccagagcctggatatgatattggataagtacgatacgcttttgtatgacttgtgcacggatgatgagataattggaatcgtggaagatatcaatcagaagaaggataccctggaagtaaacagcagcaggatacgccatgaattaagccatatctgtaaccgaaatgacggcatagagggaattaccattattacagaggaaaatcaggtcatcttttatgacaggctatcagcctcctccgtaagcagcagctgggcggacaagataagggcgcctgaggtagtaaagggggccttgtaccggggggtgggacagcctatagagtcggggaatgataaggtctatatgttccagatcatccgggaattcgtagactaccgggatatccataagtccataggaaccgtgattctaagcattaatacggatgtgctggagccggttctggatgctgggcagaacgccgacatctacctacttcagaaggggaagatcatagcagcgtacgaggaagataaatgtggaaagaagttggatgcggcgaaggacgaagaattccgctacaccaggaaaatgaatgaaatgagtggatttacgatctgtaatgcccagtccctgaggctatatcaccagactttaaaggagcagatcctgttctggatattcatagcagtaggcgcaatcctactactgatggcgctgacgtattctttgaccaggccgtaccttaaggagatcgaccagatagcagatgccatgagccaggcggaacagggaaacttccaggcacgggtacctgttaccgagaatatgacggtagaggtgcgcaagattagttcgggattcaatgaaatggtgggccatattgacagcctgatcaatcaggtcaaagaggcggtggttgagcagaaaaacgcggaactatccgcgctggaagcccagatagatccgcatttcctctataatacgctggataccatcaactggaaggccattgaactgggagaattcgaaatcagcgaaatgttaggagccctggcggatatcttaagatatacggttaagaatgcaggggcagagacttcgattgaacaggaactgcactggcttgcaatgtacatcctgctacagaaggcgaaacttggaagagaactccaggtagaagtaaaggtgccggaagaactatacggatacagaatccacaaactgcttctgcagccatttgtagagaatgcgatccggcatggcctgaagcagaaagaaggcgaactgaaactggggattaccatgagatcggcaggaggccagatgcacatcatcgtaaaggacaatggccgcggaattccggaagacgtcttacagaggcttaatgacagcgaaaatgaagcagatgaaaaagattctggagagcacatgggaatcgtcaacgtgagaaagcgcctgaacctatattatggagatcaggcggacctatattttgagagcgcgctgggcaagtacacgaaggtgcatctgtttatccctgtagtcagccctcataggcaggcagacgaagaaggcagaaaggaggagggccaatgagaattgcggtaatagaagatgaagcgccgatccgggaaggcatgagcaagattctgaagaagattaacgagaattatgaactggtaggaaaggcagaaaacggcaaaaaagggctggaactgatccgcaaagagaagccggacctggtaatcctggatatccgcatgccggatatggacgggcttaccatgctctccattgtgcgggaggaaggcatagagtgcaaggctatcgtcctgagcgcctattcggattttgcatatgcgcagagggccattgaactgggaatcgagaactatctgctgaagccgatcaagattgcggaacttaagaaggccctggaacaggcagaggtgaatatttccaaagaacagagcaaggagcagctgttcagcctggaatatatctttctgaacgccataacaggccagctggatgaagacgggaaactggctgacatgattaccgagcggtatggaatcaggggggacgagcagattgccatatttggcattggattaagcgataattatgaccgctaccatgagatggttcgccggaccatggaagaagtaggtattcacagcaatgaattccatgtctacgttatcgaattccaggaaaagggctcgattgtcgtcattctgtaccagttggaagaccaggataaaataaaagaatattttaaaaagacggtggtcccgatgcttggaagccagatacccggacggctcagctgcgcctgggggaactgccggggactcttgaatataaggaaagcgattctggagatggacagcgtgctggagtggaaccttttctttgacagagggacgctgatcagcaagaggctgattgacgcgacccagacctatccgatcaagtaccctattgacatcgaggtgcagacgaaggaggcggtggcggatagcgaccggaaagagttcttaagcagtctgcgccgcttccgggaatactgcagggagggagcgtgcacgccccaggatatgaaagaagcatgcagccgctatatgatgagcctgctgcacgtggcaaaggaatcagggaaactggagtcatccgtgtctatgcagaatatgattacgtccatatccgacgcaatattctggcaggatattgaagaagcatttcttacattttttgaaaatctgtccttgaaaaacatcggggaagatggcgtaagcctgctggtccagaaggccatacagcatatccaggagtactataaccagggaatcaccttggaggaagtggctgccaagctgcatgtgtccgaagaatacctaagcacccagtttaagaagcagaccggcaggacatttaccgagacgatccgtaaataccgcattgaaaatgtaaaggaattgctgttaaagtcaacgcttaagctcaatcagatcgcggatatggttgggtactctgatcccaagtatatgagcaaagtgttcaaggatgaagtagggatgcttccggcagagtaccggaagaagaacagttaaggacaaaaacaggcaaaatccggaaaaaaccgttaaaaatttctacttttttaaaaaatttccaccttggagggatgggagattatgctaagatgttcataacgaaaaaggagagattgttatgagcaaaagaatcgttgtatttcaaaatccaagcgatatattagaatttgtaagaaaggtcgaaaaatatccttatgatatggacatgaagcgcggccgttatatcgtcgacgcgaaatctctgctgggactcatgaatctcggttttcaaaatgagattgagttgaaagtctatgaagaagaatgtgatgacctctggaaggatatagaaaaatatgtcgctgcataagcaaagtgatgcttgtgtaatgaaactccctgtcgtataatttacgatgaggagtttttattatggagaagaaaatgaaaaaaagagttgacagaagcagctacttattcgacaataaggcgctgcttgcattaattattccgttggtcatcgagcagcttcttgcagtacttgttggcatggcggattctattatgattgcgagcgtgggcgaggcagccgtctccggcgtatcgctggtagatcagatcatggtcctgctgatcaatgtatttgccgcccttgcaaccggcggcgcggtggtggccggacagtatctgggacagaagaatcaaaaggaagcctgtaagtcggccacccaactggtatggttcattaccctgtgctcggttgtgattaccttgctggtttatgcgggaaaatacttcatcctgcacgggatcttcggaaagatcgaggccgacgtaatggggcatgccaatacctacctgatgatcgtgacggcatctatcccattcatggccctgtataatggaggcgcggcgatcttccgtgccatgggcaattccaaggtgtccatgcaagtatccatcatcatgaatatcatcaatgttggcggaaacgcgatcctgatctacggattccacagagggacggaaggcgtggccatccccaccctggtgtccaggatggtggcagcggttatcatcattgccctgttgtgcaatccgaaccagcttctacatatcgagcgcaccttccgctataagttcaactggcagatggtaaagaagatcctgagcatcggcgtgccaaacggcctggagaacagcatgttccaattgggcaagatcctggttttaagcctggtatccacatttggaacttacgctatcgcggcaaatgcggtgggcaacgccatcgccctattccagatacttcccggaatggcaatatccctggcggttactacggtgatcgcaagatgcgtaggggcaggagactacgaacaggtgaaatattacaaccggaaactgatggtgatcacctatgtatgcatggcggcgaccgtgttcttcatattctccatccttccgctgatcatcaaggcttataatctgtcagacgtgacagccagggcaaccgagcagatcatccatttccatggaatcagcgcaatcctgatctggcccatatcctttacgctgccggctaccttccgtgcgtcgggagatgccaaggcatgcatgtacatatccatactgtccatgtggatcttcagaatcgcattcagttacgtgctgggtaaatacatgggattgggcgtgttcggcgtatgggtggcaatggtcatcgactgggtattccgggcgctgtgctttgtgatccggtatttcaaaggtacctggcgcaaaagcgtgattgtgtaaaatcaaaagaagtcccttgtcaacagggggcttctatcatataatagaacctgattttgagagacatttacccgatttggacacaataggtacgagattgacaaaataggaggaattcttgtgaagagagaattagtaatcgtcattgattttggagggcagtataaccagctggtagcaagacgtgtcagagaatgcaacgtatactgcgagatctattcctacaagacagacctggagaagatcaaagaaatgaatcccaagggaatcatcctgaccggaggacccaacagttgctacgaggcggattcgcccacatataagaaagaattattcgaacttggcataccagtcctcggactgtgctacggcgcccagctgatgatgcacatactgggcggcaaggtagaaagcgccgacgtcagggaatatggcaagacagaagtcatcatagataaaacccagtcgccaatctttgaaggcgtgtcgtccccaaccatctgctggatgagccattttgactacatctctaaggtggcgccgggattcgaaatcactgcccacacggcagactgcccggtggcagcggccgagaatccggagcagaaattatacgcgatccagtaccatccggaagtgctccatactgcagaaggcacgaagatgctgtccaacttcgtgcttggcgtatgcggctgcgccggagactggaggatggattccttcgtggaagaatccatcaggcagatccgggagaaagtcggcaaaggcaaagtattgtgcgccctgtccggcggcgtagactcctccgtggcagcagtcctgctgtccaaggctgtaggagatcagctgacctgcgtattcgtagatcacgggcttctccgtaaaaatgaaggagacgaagtagaggctgccttcggaccagaaggagcttatgacctgaacttcatccgtgtcaacgcccagcagcgtttctacgagaaactggcaggagtttcagagccggaggcaaaacgtaagatcatcggggaagaattcatccgcgtattcgaagaagaagccaagaagatcggcgcggtagacttcctggtgcagggaaccatctacccggacgtggtagaaagcgggcttggcggagaatccgcagtcatcaagtcccaccacaacgtgggaggcctgccggactgtgtagacttcaaagaaatcatcgagcccctgcgcgacctgttcaaagacgaagtaaggaaagccggactggaacttggcatccctaagcacctggtattccgccagccgttccccggcccgggacttggcatccgcattgtcggagaagtgacggaagaaaaggttaagatggttcagaacgcagacgcaatctaccgggaagaaatcgctaatgccggattggataaaagcgtcggccagtacttcgccgcgcttacgaatatgcgaagcgtcggcgtcatgggggatgagaggacctatgattacgcggtggccctcagagcggtgaacaccatagacttcatgacggcggaagccgcggagatcccgtgggaagtgctgcataaggtgaccagccggattgtgaatgaagtagatcatgtgaatcgagtgatgtatgatattacctctaagccgcctgggacgattgagtttgaatagtaggcggtaggccagaaagccttattttacagggcttccgggcttcggcctttgaaaattgcattttcattgcatttttttaaataacctgcttatgatactcggctgtgaactgattgcttgtgtaatcagccacgctttctgttgcaggtgtataagtaagttttcctgtcagcttctttgctacttcaaagttgctgtttggatataaatgcccataggttcccaaagtcgtttggattttttcgtggcctaaacggtctttgatgattaatgggttttctcccatgctgattaacagggaagcatgggaatgccgcaaggcatggattttgatgcggtgaacgccagcaagttctgccagcttttccagggctcttggcaatgtatgcttgctggtgggaataccgctgtaactcattacgaaatcgcagtttgtaagaactttctgttgaacttctttccattcttttagttctttaatcgtatcatcatctataacgatatcccggatacctgcctgtgtttttggttccacaaacttatattctgtcatggttttgtagtaaagattcttgttgatgctgagaatgcctgtctcgaaatcaatatctgaccattgcagtgctgccgcttcgccaatcctcatgccagtcataaataataaccagaatgaaatgaacagatagtgctcatagtaatcgcccttatacagaagagaaatgactttctggaattcatctaatgtccagaaatcaattttgggttttctgctcttgacatttccgatcattcgggctggatttttctttgcaagtccgagtacaatagctctgtcaaatgcgattgcaagcataccctgaataattcttacataatttgggctgtagttttttgccagttttaattgccagttttgcacatgaattggctcaattttgtcagtattcatcttatagaaataggaaaagtgtttttcaatggtagcatatctgttcttgtatgtactttcttttacctgggttttataccagggaagataaatctcttgaataaattttttaaaagtcacttcctctttcttttcagtaagttcatctggtgtagacagaataagctttgaatattctgcccgagcctctttctttgttgcaaatccactgcgatatttttgtatttgtttcccagttacagggtgttttcctaagttcgccctgaaataataggttccgttagttgctttcttgattggatcttttgccatggttacactccttctctaatgcaagaagtacacttagttttcagtatctggcaaagtgattcccaataattcctcaaccgcttcctttggcaccctgtccagtttctttgattgataataagtatggcctttggcaatcatcagctttttcgcttcccggataatatctgctgaaaaagaaggaccataacctaactttatcaaatcactttttgttactgtaatcattctgctcctttctacggacaggataaaacttcaatacctgtccattattatatcaagtttagagtaattttactattgtaaaatagcctgacgaaaaatggtgtaaatctctcagaagccagttcctgtgcccttcccggccacgtagaaggcgttactatgtaatcttaaagctgcaggcacgcaataaacgcaggcactatctgcagcacctatatcaatcttctgagaggtgtatgcaattatcaaagtacaactggggtcttacccatttacttagaaatagtcatggaattttaaatattggaaaaaagcagaaaaaagctgccataatacaggcagccgataagacattaagaatgtttttcagttaatcgtttgagaatagagaggatggccagcatatcgtcttcgtccaattgttttaataattcattggctttttgatacagaggcagatcatgaagcctttcatcaaagaattcctgaggtgtgatttcaaaatagcggcaaatttcatagaactggctcatggaaggcagagaacgtccggaactgatattctggatgtaacttttatttttaccaagatcaagactcatctggtattccgaaacatcttttttaaggcgaagttcggtaatgcgttctgcgataaatttttcatccatctgtcacacctccattttactttattttaaactatttacgaaattacggattaaaataggtgtattaaagatataaagaacaatgttattgattgtaaccgtaatttgcagatacaatacattgcatcaagtaaaatggtgggcttttggcgcgttacagacgtaaaaagcaagataaaaaatgtgttgcttatatgatttcggggtatgatgtaatagaggtgagtcagatgaaagtaatcggaacagaacaggaaatcgaatggattaaagaagccttgcagaacaactgtgagggatgtcccctttctgcattgtgtgcaggagctgctaagaaagacagtgagcagtacggaaaggtaaaacagacatgtaaagaattcctgggtgagcatattgtttttattatagaaaacaatatatagtatatacggaattgacacaaacaatatatcgtgctactatactgatatagtttattttttatgcattcccttgtagggaagttctgggattctgcgaatcccggaatcaacaggcagagaaaaacttcctgtctggcataagctgtttatgtttgtataaagtgtcactatgcgatgtgtatcgcggtagtgatgctttttgttttattaggtaaaataccagagacttaggaatgaatggagaaatactcttttcattcctttttttatttgtttggtggcagatgtagcagccacaatcagctttgagctgtttatggataaaattttattttaagaaaggtggaaagacacatgaatgaaacaagaatttttgcagatgcgtatcagacgacgtttgcagacccaaaggaaatgctggaatttctggcacagagagcaaaagaatcttcgtggattcgtaagcctacacgaacactgcgactggttccggctattcaggaagcgggtaaaatgaaggacacagtaggaaagaattgggaggagattctggaggatactgagaataatacccagcttgccttaaaaattaagggtgagacctatccggtgcgtacctgtgcaattcggacaattctggatcgggccggaatttctggttcagggctcagaaaactggaaacagcaaattatgcgaaggtagtgaattactgcctgaaggtagcgaaaggggatgctctgattaagattgcagatggaaaagtatctgcagttcacggcggagatcaccatgattacagcatattggatatgcgggcagtatttgaaatgaccatgcagtttctgaataccaattttccgggaaacagttacgtggaaggttccggaatgttcgaccattccattgtttccgcaatgtgggaacttgggggaaatcaggaacttctggatacttacagggatgctttaaatgaccatggcatcagcgataatatcattgcacctgctgtaaggcttactacatcagatgttgcagtaagcggagcaaacctgtatccgatgctgacttgttccagcagtggtaggacgatcagtcttgggagtccaatcaaactggcacatactggtggcgctgacatgacacagtttctggcaaatttaagaatgctctgttccagatatcaggatgcaatttcagatataacaaaattgatggacatcgaaatccgtcatccgctgaattgtattcgtttattgatgaaacgcctgggaatccgaaaaaagttgatcaatgacgtggcggaaatgttcgagttccagaaaggaaacggaccctgcactgcacatgacatttattttgctatgaacgaagcatcgttctttgcagcctgtgaaggaatgcagggggcagcaatcattaatctggaagaacagattacccgtgcattggctttagactggaaagagtttgatgtaggcggagcaatcaaatggtaaggcaataagaaaaatcagaaggaggaaataaagaatgacaggactgaatttgaattatgaaccggagattgtggtggatatcagtggacttacgagagaggaatggcttgattatcgtaaaaagggaattggtggcagtgatgtggcggctattatgggaatctccccgtttgcgacaatcagggatctatataacaacaaggtgggtatcctgcctgctattccggaggaagaagaaagtaactgggttgcaaaggaagtcggacatcggctggaagatcttgtcgcagaaatttttgtcagaaagacaggactgaaggtatttccggtaagaaaaatgttccggcatcccctgtatccgttcatgcttgcagatgtggatttttttattttatttcccgatggcacatacggaattcttgaatgtaaaacctgtaattacaatgcgagtaagaaatgggatgatgatgcaattccggataattatgtacttcaggtcaaacattatctgtcggtcatgaacatgcagaaagcttatattgcatgtctgtatgggaataatgaagatgaatttgtgttccgctatttggagcgtgacctgatggatgaagaagacatcatagaacaggaagcgttcttttgggaggaatatgttgaaaaacatgtggaaccgccatataacggaaagacagatctcattttagatagtatccggagatctgtgggatatgcggatattagtatcccggaaatcgaattatcatgtctggaatctaaaaatcttgaaagatatcttgctttggcagaagaaaaatcccaaattgaaaaaagaaaaaaagagatcgaatcggagcagcgagcgatcagtgtcccttttgtggagcagttaggagccggatgcaaagccattttaaaggatggtacgaattgttaccgggttacgtataatccgacaaaacgtacacagatcgcaaaagcgcagatggaaaagctgaagattcagcatcctgatatttatgaagaatatgcgaagacaactgagagcaggacatttcgtataaagaaggaggctgcataatgtttggcagattcagactggagggatgtggaagatgcgatgcagatatgtgaataagatctatatgaatgaaggaaatggctttactgtagcgctctatagtacgcaggatacttctgtgccattgtcagcaagggataagtatctggcatcccgaaagatgatcgggtttactgctgttggatacaatttgccccttacagatcagattgaactggaaatggaaggagcctgggaaaacggaagtcatggtctgcagtataaagtggaatcctttatggaaattgttccccggacgaaagaaggaattattggatatttagcatctggtgcgataaaaggtgtcagacagagaacagcggaagccatctatcatcaatttggtctggatacgctggaaatcattgagaaaacaccggagaaactgctttccgttccgggaatttcagaaaagaaactccatgggattatggattcctttggaaagaaccgggtgtttcgggaactaatgacttttcttgctccttataaagtgacacccaaaaaagtgaatctgatcctacagacatttaaagatgaatctgtggacatcatacggaaacgcccatatatgttatgtgcagtcaagggatttggattcctgacagtggataacattggcagggcacttgggaaaactctgaatgatcctatgcgtatttccgggtgtatcagttacgtgctaagtgaggctatgaaggaaggacatctttatctggaacaggaaattttaacagaacggacactggaagtgctgaataaagatctgacttttcaggcagtgaccgttcagaatgtaagcaatgtactctaccgtctggtcatgcagaacagcattgtgttggatgggaaaaaggtctataccttccgtcagtttgaagcagaggaacagaccgcagccatggttgcaaggcggattctttatcctatggaatcgcttggtgtggagactgaacttgtacaggcacagaaagtccttggaatttcactatcagaaaagcagaaacaggcggtgcggatggtgtttgcgaatcccatcagtattattacaggcggtccgggtaccggaaagacaactgttttaaaggtgatcctttatattcacggcataaaatgtaagtcggaagtgcagttaatggcaccgaccggcagagctgcaagacggatggcagaaagtacgggtaaccagaacgcctcgaccatgcatatggcactggggcttctgggagaagattatacggctgagtttacctatctggaggcaggatttgtcaatgtggatgaaacatccatggtggatatgcggctggcttatgaatttttccagagagtcaaagggaatacaagaatccttctcgtgggggatgtggaccagcttccttcagtgggagccggtgatgtattccgtcagcttatccaatgtggactgataccggtcacagtgcttgaccttgtatatcgccagggtgccacaagcagcataccagtgaatgcaaagctgatgcaggagggaaaaaccaacttgatcctgggtgatgattttgtgtttgtaccctgcaaagggacagaagaaactgcagataccgtaaagagactttatcaggaagaagtcatccaaaatggtctcgaccaggtgcagatcctgacccctttccgggtaaggactgcagctggtgtggtggaactgaaccgcacgctggaggatatcatcaatccaccagtcagcggaaagaaagaacttgtgattggaaaagacgtattccgggttggggataagatcatacaaaataaaaatactgcacttatcagcaacggagatatgggaaccattctggattttgatgaagacgaggaaggaaaccctaagatcagtatccagtttacagagaaccggatgatagagtatgagttggagcagatggaaatgattgaacatgcaaacgcaatcacggttcacaaatcgcagggatcggagtgtccggtagtgattattccgtgggtgaaggcattctttgttatgctgaaacgaaacattctctatactgcagtgaccagggccaagtccaaagtatatctggtcggggattggaacgcagtttgtcaggcgattcatactgatgacagtggaaagagaaatacagtgcttgcaaagagaatctgcagttattatgaccagtatcaaagccggaataagcctgcgcaggaaatggaacagttaaaacttgcagtataaaaattttaagaaatattacaatctcagagaaatgcagactattactctatgtagggttttcgtctgcttttattttgaacagaaatcgaaaggagcagaacgaatgaaatcaatcttatatgacaaatcagaagctgttgcagcactcaaccgggtggaaggatttaatcctgtggaacttgcaaggagattggaaaaggaaggacaggaagatcagctgtatctggatgtgaaataccggaaactgtggttccgtctggtatatcccatgggaaaaattatcagtattgttcgcagtttttcagaaaatgcagctttggtagaagcgagaatctatctggataagtgtgatgcggaggacaatttcattgccaacgcattttcacagaaattccggtcagaggatccgaattttggagcgaaatttctggaacttgcggaaacggctgctgtcggacgggcactgtcagatgccgggtttggacttcagtttgcggatgtaggagaggaaaatgatccggaacaggtagatgccgggattcagattctgcagttatctcagaattcaggaactgtgcagaatctaaacagtgggcatggagctgcctatcaaccggatgagaatacgtatcaacagtctgcaaggcagatgacgggtggttctattccgctgatgcagccacagtctggcatgatgggacagttcttccaacaggcacaggcaaacggctccatcatcggtcagccatccatgcaaaatacttatggccagcagcccggaatgaattctatggcggttggtacagcgggaaatgcgatagacggttccctgcctgtggaagaacttctgcagcacatgacttatgagcaggcggtgcaggttgtgattccgggcaaaggaaaatttggcggaaagaccatgggacaggtggcaaaagaaagtccgcaaagtctggactggtttgccagaagttattccgggaataacaatgcggttccggctgcagctaaatttttgttaaacaaagcattactaatggcaggctaatgggttctgcctgttaagaccccacagtcagctatctgactgcgggggaaaggaggcttgaatatggatgtatgacatgtcagggtttgattacgatatccgcgatgtggtgcgtgtactgaatctgcaggtgcgtcggaaaaatcccagttcatatgatgtggactgtcctttctgtaatcataaaacaggaaagatgaatgttaatatcaggaaaaacgtcttccggtgtaactactgcaacgagcaggggggaatgctggatttatatgccaagttatatggactttcaaaggcagaagcaaaccggcagattcgggaggcattaaaccttggacaataccgggatgattataaaattccagagaaaaagccggagcctgagattcccgaaaacagtgaccgtgcatcggatgaggaaatcaaccatacgtattccatgttgctttcctatcttacgttatcagaaaagcacagggaagacttgctggcgagagggcttacggacgagcagatcgagatacaaagatatcggagtgttcctctctttggattaaaaagtctgaccaggaaactacaggaaaaaggatgtacggtacagggagtgccgggattttatcaggataaggatggaaaatggacgattcatttttctgtgaaaaattccggatttatgattccggttctttccatggaaggcctgattcagggatttcagatccggttggatcatgtgacagattccagaaaatatatctggctttccagtgtaaattaccaatatggagtctcatccggcagcccggttcatgtaatcgggaatctggatgcgaaagaagtgtatgtgacagaaggtgctttaaaaggaaccattgcgtattatctgtctggcgccacgttcttatgtgtgccgggagtaaaccagcatcggaatcttcgccccatattggagagcctttccaaaagaaatcttcagcttgtatatgaaacttatgacatggataagaaaatgccggttgtttgtgatggacagtatagtaaatgctgcgaatgcacgcaaagtaacaggtttggagagtgtccttataaggtgaaaaaacgggatatcattcaaagcgggtgcagaaaactgtacgaactttgcagggaatattcattaccggtgaaacggatgctttgggatacggatgaaagcaaagaatggcgtggacatatcaaagggattgatgatttatattatgatttgtgtgtaaatcagatagataaaacgtctcaaagattatagaaacaggaaggccggagtattctgctctggtctttcttgaaaggagaagatttatgaaagggaaaagaaacgtaccattactgtttatgataattgcatcgttacttatatttatatttgctgtaggtaaattgattgaaatctatctggagtaccagaaaggcgatcatacgtataaagaactgctggagtacgtacaggagccagaaaaagaaccagatgaacaaggtagtgatctggagccagaagatgattcgggatttacatttcttcaggtagattttgagggattgaaggctcagaatccggatgttgcagcatggatccagataccggcactttctgtcagctatccggttgtacaggggaaggacaatttttattatctgcatcatatgtttgacgggcaggaaaataagaatggcagtatctttatcgattatcataaccagccggattttactgacagtaatacgattgtatatggtcataatatgaagaatggaagtatgtttggaacgttggatagatatcaggaaaaatcgttatttgagcagtatccttgcttttatatctatcttccggacggcatcttagagtacagaattgtatcctgctatgcaggaaggacaggaagtgtgggatatacttatcggtttcctaagcaggaagattttcaggactttttggagaagattttatcctacgctgtctatgatacggggacggaagttacggatacagaccatatcgttacgctttctacctgtgtcaactcggaccgaaattatcggtacctggtacatggaaaactggagaagaaaatagagacgaggtgagtataatgacgcttagagaagctgggaaaggaattgtgacaactggtggcggtacatatcgtattggtcattatgatgaggacggttttgaagcagaaacagaaatgaccgcttataatatggcggagctgaacattttatatcgagagttctgtaaggataacggaatgcgccagaatactgtgaggtatgtttcaagagtgtgatatggaatggatgatggcatcggcagctattgctggtgccttttcatatttttgagggagcggttgcgttttacgtaggtagtacgtacagagtaagtagaaagaaaaaaggagtgatcattttatgattaagaaattaagagtagccgtagatcatggtaaccgcaatatgaagacctgcaatcatgtattcacgacaggactgacagaaatggataagaagcctgcaaggggcgaggtatacctgcggtatcaggacaagtattatacacttagtgaacgacgcatcccatatcagagggataagactacagatttccgcttttttatcctgacactgtttgcaattgttatggaattggaagataagacaccgattcagccagaagatgtgattcagattgaacttccaatcggacttccaccaaagcattacaaagaactgtatgacaagtatgagaaatattttaagggtgatgggaaagtgtttcaggtggaatactgtggaaagaaatatcatctgtgtatgaaagatgtgagggcttttgtgcaggatctggctgccatgatgacaaagatggataagattggggaagctccgaaaacagtaggaattgatattggtgggttcacaacagattatctgctattaagaagaggcaagcctgatatggattattgcgattcgttggaaaaaggcattattactatgtgtaatgagatcatttccaaagtcaacagtgaatatgacatgttgctggaagaaatagatgtggaaagcatcattcgtgggaaaacagagttttatgatgagtatgtggtccgggcggttgagaacatggtacaggactatgtcacagatcttctgaatagtattcgtgaacgaggtgtggatacgaaatctgcttataccgtgttcattggcggaggttctatactgctcaagcggtttttagaaaagtctgaccgtttgggacgttatctgttcattgacgacctgcgcgccaacgcaaaagggtatgatctcttgtatcgtatgtatgagagcagcaaatagaacgggaagtgattgttgtgacgaaaaaaaaccccaataaatttacgattggatttaaaaaaagtaatgtttcccaccaaagagtggttgagattttaaataatacggaagataaggcggatttcattgccagcgcagtgcttcattatcttggcgagggaaaagaaactgattctttgaatccggacaagtcttccctattgccattgattagaacaattgtaaagaaagaaattcaaggagcaatctcagaaaagaaatatgtttctgcagaaagggcagattcggatgagacagtcatggatctgtctggttcagaagaggaaccgattgctcttgatgaacatattataaaaaatatctcaaatgcattggatgcattccgaggtatatagaaaagaagcagccttttgatgggctgcttcgatttttgtcgaaaagtttttcaattcataagtcattcataactggctcataagtcactcataaatggccattctataatcaaacaatggtgaagtggagaatgaaaagaattacttttgttttcggagaccgtcaaggagtccacggagcgtatgtaaagccagatctttttctgcatctgtgcagtcattgagttcattgatgatctgtttgatatagggatcaatgggcggcttgtcgtagaagatgacggaatcaagcgaaatattcaaatatctggatacaagactaagtgtttcaagtcttgggtttgcagtatagctttcaatatccgaaatcgtccgcaaggaaacatgcacattttcagccagagcattctgtgaaagattcctgcgaagacgttcttcttttacaaagtctccgagcaactttttttccatcatttcatcacctcacttaacgcatatattttactctagttctgcagtatatgaaatgcgttatgatacgcataataacgcaatataatacacattacaaaaatacacaggaatcacgaaggagaaatgataggttgagttacacggaacgggttgagaaaagcaggaatttgttaaaaaaatcttgcaccaatatttggaacacccttctgttaaatatgcagaatatgagtcgaatacacctcgtatagcacataataaaatatggatcaaaaagaaagtcgaattgggaaagcgccgattcggctttctttttgtatgtcaaaatttatcgaaaattgagatacggtgccgatctccgccttctgggatttcaaaagaagaacgaaatcaaaatacaggaggataaacaattggatgaatatacatataccggttccaagatcaagaaccagtttaccgcgtacctactggcacagattcggggaacccgacaaaattacttaagaaaaatgctgcggattagcagtaatgaaatgctggcagaggacttgacagtggaagaaattggaatttcagtggaagagagcctggagatggaatatcgcgaagaactgttaatgagggaggcagatgggtgctatccggaatgggacgagatgaaggatcagaaacttgtcgaggcattgctcttactgcgtgaggatgagagaaaactgatctatcagcatgtgtttgaagaacggacatttgaggatataagccggatcaatggattgcccccttataaggtgaaaggaatttattattatgcaatccgtaagatcagaaaatggatgggaggtgacaggtaatgaattttgaagaagtgttgttccgggcgaagatgggagaccaggtagctactgaacagatagtagagatgttccgaccgttgctgataaagaactctttgattaatggaagatttgatgaggatctgtaccaggagttgagagttgaagtactgaagtgcatcagaagttatcgggaaatggagtagatgctgtttagaatagcataattatgtaggcagagcaggaatgattgctggtgtaaagataaggttcctgctctgttactttatacacatgtaaatataatagactgtttagaaaccatgatttttagtttaaaagtttttcagattcattaaacgtttttatcttctccggtttggagattcatctgcaggagcataaggtcattcatagtggtgtccatattcccctttcttattatgaatttcagacgttcgctttcttgacataacatcccagctggatattttctaaagaacaaatctatgaggctgtctggaaggaggattcaaagcactgtggcagcgctgtgatcagcagactcagacggaagattggatatgggtacatagaaactgtggtgaatagcgggtataagtttgtaggatgagaaatgagataaagacagaggcagttgctgcgtgttggagtgatttggcaccttgtagaaatatgaggtgccattaatcgttattggtgaatatttagtttcccatagatggaaaattagtggtgtggtagaatatagcttgataaaatatatagaaatacgggtgatatttatgagggatgattttacgcaggctgcaaaggatttgatggctaatagagagggatggaaatgtagtaatccaagatgtagaaaaggaactagcagagtggcaactgagaaggaagatatcactaatattggagtggtcgcccacattgcagcagcatcaaagggtggaccgagatatgatgaaaatttgacttcttaagaaagaaaatcatatgataatggaatatggcaattccaaactttctcaaaactgataaattcagatagatgtgagtgaagaggcaggaatgtcaggagtgcaatttcctaatcataagaaatactggtgctggtttgtatatgcatataatttagttggatggagaagtgttatgaataaaaaatatcagatatttgtgagctctacatataatgatttaaaatatgagcgtcaagttgcaattgatacgattatgaaactacggcagataccggctggtatggaattattctctgccactggagaaaatcaatttgaaatgattaagcctgttatctatgaatcagactattatctgttaattgtagcaggaaaatatggcacaatttgtgaagataccggtctcagctatacggagatggaatatgattttgcagtccaaaatcacaagcgtgtgattgcctttgttaatgatgatccagataatttgccatttagtgatagagaagtaacagataaaatgcggagaaagttgaaaaaattccgtaagaaggttatgacaaacaaaatggtaaaaatgtggcatgataaggaagaactattccagagcattcccataagtataagtacagttattgaaatgtatccatctaatacttgttggattcacgtggatgaaaatgatatctatactcctattggaaactatgttgcattaaaagaatggcttcaaatagaaatggaagataatgttgaactgtattataataacttggaaaagtctgttcttcagcttaagaaagaagcaactggattatgtcttacaatagatgttcctgagaagagtgcagagccatacttagatgagttcgctgggttcagcattatgatcctgcttatttgccagccatctgtttctcttgctgttcgatcatttgacatctgaaaccagagattgggtaagatatgttcttaatgaatatcatctgttgattgattattctttaaaggcggacgaaaaaattagcatgtggatagaaattaaaggttattcgattgaaatgtataaacaggcatttccattggaagcaggagaaaaaaagaggatatcaatttctcttaaagattttatggaagatgctgacgattggaagaaaattaaggagatatgtttggtatttagaccggtggaaaagagaacaactggtatgttagagatgcatggcgtaaaattgggaagataagaaattttgaatgtgattagctatatagatattcattggcgtaccgtcttactggcttgcgtaccataaattgatacaatgcacccttggctgtcagagggtgcatttttaacgattacccatactcaaaaaacgatagggtgcatttgccttggatttatggtattctatggtaaaacacagcaataaaatatgatcttcttgaaaggtgaggtattgaatatgagtaaggtattagtagcgtatttcagtgccagcggcgtaacagcgaaactggcgaagcggcttgcagaggctatcggagcagatttacatgagattcagccagaggttccatacacgaatgctgatctggactggatggataaaaagagccgcagcagtgtggaaatgaatgataagtcattccggccagctgttgcaaataaagtggagaacatggagcagtattcagtgattttcacagccttccctatctggtggtacgttgcgccgactattgtgaacacgtttttggagcagtataatctgcaaggaaagacaattattccactggcaacttctggaagcagcggaatggggaacacaaacaaggaactggcggtttcctgtccgggagcagaattaaaggaaggaaagagatttcctgcggatgcaagtacggaagaactaaaagcatgggcagaaggatttggaatttaagatacatagaaatgaccgataaacttatcaatatagacccataaagttatctttcatgacaacgaataataagaaatctatggtaacatcctacccgtagtggtaaattattctacaggaaagggtgcgaagcatggaaaatgaagtatacgaaaaagattatggagaggaattccgggagcgaagcgataagtcagagggaaaggactttctggacacattaatggaggttggattctttcagaagtaccaggaagaaatgaataaaatcccaaagcgtgtggttccaaaggaaaaagttgattatgaatacctgcttggagagtgtgatgcttacgtccggcagtttggaggaagaatccggggcgaggtggattaccagaaatggcaggcgaccattgatctgtacatggaacattttgagttttgtgaccgggaggcgctgacgctgttaaaggaaatcgcagagcgggcggaaaatgtgacgtttcgatgaaagatgggttgattcggatgtcggtgtttattggatattttgatgaggtgtattaaaaaacaggctgctggcacatgaaaaagtttcatgtatcagcagcttttttctatcgcagcaaaggcatactgcctgtgagcttattaacctttttctttggtccgcagatagcaaggccgaagtattgcagggtgctctctgacacgttccccatcttttcgataaactcatcataggttttacagccctgtgccagatcggaaaagtcaaccacggtcaaatcctgaaagtcgggttgatagagcttctcacggattgttttgatgatttccggtgagcctttcaaaattggcacgggaaattcaatgatgccgagatgctcgtttccactctggtctgtaacatttgcaccgaccacctctggcatctcttttcacagggagattcccatgatagccgccgtatttgcgataatgccaagcggcagattttcgtcaatgaccatgacgcatttttcattctgtaaatccattttagagttcctcctgtttttgtgtctttcctctgtattcagaaaggaacagtccaatcagtgccaggaccgtaccaacatcggacatcacggttactttttctttcagtataagggcagatgtgacaaccgtgataaccggaactaagtaaatgtaaatgcttgttttgacagcacccagaattttcacagccatgttccaggtaacgaaacaaagtgcggatgcgcccaatcctaagaagatcagatttcccaggtagactggatttgcgaaccgttctgctccaatacggcagtcaaacaggaatagcgcaggtatcataaatataatgacataagcaaatacccgccttgtggtctggatggtgtgatatccaaaaccgctgatcttccgtgtcaatacagaatagcaggcccacacgactgccgcagctacggccaacaagtcaacgatgggatttaactgcatctttgctccgttaaagctgatcagacagatgccgaccatggcagctacaaatccgatgaagaaatttgcacgcagtttttcttcctttgtgaacaggtgggtaagcattgctgtgaaaaagggtgctatggagataatgacacctacgttggaggccattgtataagtcagggcaatgttctccagcagataatacaggcacacgccgcacagtcctgccgccgcaaagacagcttcctgccgtttggtagttcctctcatccggtggggatagacgatcagcaatgccagaaatcccaggataaaccggaagaacaggatttctatcggttcaaaatccattaaaagcactttggtggagatgaaggtagttccccatatcaggatcgttaccagcgccgccagatgcccggttgcttttttactcatccggcgtttgctccttctctaaaaatatgtcacggtaaagacccggagccaatccgataaatcggttgaaatagttcgtgaaatgactctggtcggaaaagcctgtctgcatggcagcctctatgggaggtacacagccttgccagcttccctgctgacaaagcactttgcaattattccagaaattttttattcccataaggattcacataatcaggagggcagagatgttgctcgctccatatcatcatttgatttaagataggggtaaaactctgccctaattcggttaaagaatactctacctttggtggtatctctttatagatcttccggtgcagaaaaccatcgctttctaattctcgaagttgcttggttaaagaagactgcgtaattccatccagccggcgcattaactcgccaaatctctgaaccttataaaacgcaatataccataagattatgattttccattttccacctagaatagcctgtatgcagctcatgggaacacatctggtcatcatttcttctgtttgaaatttatttcctgccatgtctgattccttcctttcacgtttgcctttatagagagtatatagcaacggaaggaaattttaaagtacaatctttttttagtattagtacaaaaaatactactactactaaaaaaattgcgtacttgaataaatctgtctgctcctgtactcttgtggcgaaggagatgataaacatgagaaaaacactttttacttctgaatctgtaacggaaggacatcccgacaaagtatgcgatcaaatttccgatgcaatccttgatgccattttacagaaagaaccgaaggctcatgtggcctgtgaggtatcagccactactgggttagttgttctaatgggtgaagtatcagctcatgcgctgcacgatattgatgtagaacaaattgtgcgggatactgtccggagtattggatataccggaaatgattttgggttcaatgcggacggaattgctgtagtctccgctttgcacagtcaatccccggacattgcccagggagtaaacaatgcattagagactcgtttttctgatacggctgatattggggccggagatcaggggatagtttttggatatgccacggatgaaacagacacctatatgccaatacctgtctatctggcacatcggattacccacagattagcagaagtccgcaaaaatggaagtctttcttatttagggccggatggaaaagcgcaggtttccgtggaatacgaaagcggcaggccggtgcggattgataccgtggttctgtctacacaacatctgccggatattctgcatgaagtgattgaagaggatatgattaaaaaggttatcattccggtcattccgaaagaattattggatgaggatactcgctattatatcaatccaactggccggtttgtgataggcggcccacagggggatgccggtttaactggccgtaagattattgtagacacctatggaggatttgctcgtcatggaggaggtgctttttcaggaaaagatccaacgaaggtagaccgcagtgctgcctatgctgcacgctatgttgcaaaaaatatagtggcggcggggattgcccatcgatgtgaagttcaaattgcctacgcaatcggagtggcaacgcctgtttccatttttattgatacctttggaaccggggtgctgccggatgtacagattctggctttggttgaaaaatattttgatctccggccttctgcaatcatagaagcatttgatcttagaaaaccaatctataaggctactgctgcttacggacatttcggaagaaatgatcttgaccttccgtgggaacatacagataaagctaatgtgctgcacaaagaattgatgaacaacacaaccgcaggaaaggagaaatgatttatgcattatacaggaacgatttggagaccgccttatgaggcttactcacttttgattcaagtgacggcaggatgtacccatcactcctgcaaattctgtactctttatgaggatttgccctttaagtttagaatgtcgccgcgggaagaagtagaggaggatttaaaagaagcaagccggtattataagaaggtgccgagggtattctttacgggagcaaatccctttgcattgagtgtagataagctgaaaacactggcaaagagcgtacatgaatattttccggcctgccaaagtatgggctgcttttcaagaattacggatgctaccagaaaatcggtggatgatttaaaggaactgcgtgcccttggatatgatggaattaccttcgggattgagaccggtgatgatgaagcgctgacctttatgaaaaagggttatctggcaaaggatattatcgaacagtgcaggaagatggacgaagcaggaatcagctataactttttctatctgaccggcatttccggttccggcagagggaatatcggtgcaaaggagactgcaaaagtcataaaccagctccatccgaagattattgatgcgtccatgcttacgatttatccgacttctgagctgtacaaagaaattcaggcgggaaattggaaggaagagacggagcttgagaagctggaggaattaaagacacttattgaaaatctgacagtggatgcaaggtttgccacagatggagcctctaatctgattcaggtgcgcggtaatctgaaaaaggacaagaagaagctggttcggtttttggagcagcagatcagcagtcaggatgaaacatacctgcggaaatatcgtgagaatctgcgtcacctgtaatacaggatgaagtgtcagcaaagcgatttgctgtgctggaaagacaatcattttccgcagggcaaatcgcagagctgtataaaaaggagggacatttatgcattttacagggcgcacatggagaccgccttacgaggcaagctcgtttattttacaggcaacatcaggctgtacctatcgtaattgcaacttctgtagtttgtataaagatgaaccatttcggatgtctccaatggaggaatttgaggaggatcttgccgagctgaaacattatcagccaaacgcaaggagaattttcctgactggtgcgaatccgttcgccatgagttatgagaatctgaaactccgggcgctgacagtccgggattatctgatcaaatgtcagacgattgccatgtttgccagtattcgggatataaaaaataaagaggtctggcagcttaagaaactgcgggctatggggatcaatgggctgacgattgggacagaaagcggagatgatgaaacgcttactttggcaagaaaaggctacacttctcaggatatactggaacagtgccggaagctggatgaagccgggattgaatattattttgtgtatatgacaggactgtcgggaagaggtggggagtaccgcaatgcggtaaacagtgcgaagctgttcagccagttaaatccttattttatttctgtggattccctgacgcttttcccggaaacagaattatatcaaaggtatcaggaaggaactttccttccgtcaacggaaaaggacagactgcgggaactacagatttttatcagcactttgcagttaagaatacatttgtttgcggattcgaaatcgaatttttatccgactacggcatacctgccaaaagagcgtgaaaaaatccttgaggaactgcagcatgtgattgatacggtggatgagaaagacatggaagcgtaccgagcaggattgcggtcattgggttgatggggcattacatatggaaggtctattttatatagaaataatagatggaaaaaacaatttttgattatggtatccggtcaagcagtttcgctgattggcagtacagcggtacaattttcagttatttggtggttggcggcaagccttgactcaccaatggtattagcagttgcaagtatcgcagcatatattccacaaatcctcatgggaccgtttgtaggtgtatggcttgaccgtatgaactggaaatatgtcattatggcggcagatttgtttaccggcagcatatcggcggtttttgctctcttttttctggcaggtacaccgcaggcatagatgggctaccttttactggggctgcgggcgataggtggagtattccagacacctgctgtacagccgtagtaccgctgattgtgcggcgctaccgctcccgctgattttattttgagatcttgtgggttctattatagccagcgacgctttagtgggaagagccgaactcggtaaaatatgtgttgaaaaagtgctgataccatgttaaaaaattaaaaattagtaaggaaggctttttggaaggaatgtatgtttacggatgatataaatttgtccttattatagaaataacggttaacccggaggtgttagaggtgagtagggctatcttagaacagtacgattctgacttatgggaattttaagaccggagtatgtagtagaaagaccagaatgtgaatttccagaaaccgttgtttgtgaattttcggagacaattatacaggaaattatagaaaaatatcaggggaaaagaattggacgtttaattagtgtgggtggtgacattactatatataaaattttttataaaactatcagaatagctgtttgccaagtaatggtgggggggccagcatgcgtgagtaatttggaggagttaattgctttaggagcgaaaaaatttttgtatgtggtgaatgtggggtattggatcgaactattgatgaggtgcacatctgattatctcaactagtataagccacactaaataaccttatgtttcacttgactaaatttccatctgctgcgttgtcgtcaatcgacgtagccactgctacgcctcattcctccgccttgcagactgaaaatttattctgcgtgaaacataaaggcatttagtgtcgcttatactagtgctgtacgagatgaaggtacaagttatcgttatttgccagtttcagatgaagtggaacttgatacttatggaataaaagtgattgaagaagtatttaaaaaggaagggttgcagtataaaaaaggtaaagtatggacaacagatgcaccgtaccgtgagactcgtaagaaaatgttgcaacgtaaagagcagggatgtattgctgttgagattgagtgtgctactttggctgccgctgcaaagtttagagggattacattgcacaatttgtttatgcatgtgataatcctgatgcagaaaaatgggatcagcgtggattaacagttcgtcctgtttctaaaaaagtacagacgtttgagcttgcaatggaatgtgcaataaatttataaattctaatgaagctatatttaaggtattgaaatgacaaaagtggaatggtaaattagtggaactgaatcaatctttttgacaagtatgaactgtcttgaaaaatcaaataggcggatgtaaagatacggagccagtaacttatgaatttcagggttattggctctattttatactcttattgatgtgcttatcattgtaggctttacttccccaaagggtagttactttcaaaaaagtgcattcttgttaagggttatatgaaatgctaaccttaatctgaatacacagaaaggaagaacaccaatgagagagattgaaatagggccgattcgtccgccatcagagagtaacagcctgctgattcgggttacaagagggtgccactggaacaaatgctatttctgtggactttataaatccataagattttccatgcgccccatagatgaaaccatcgaggatattaagcagcaggcagagctttaccggggaaaaagattacttcctgctttctgcaggatggtgatgcgctggtattaaaaacggattatctgctccggattctggatgcaatcaatcagtatttcccggatatgcagtatatcacttcctatgcccgtgccgatagtattacccggaaaagtccggcagaattaaaggctttatggcaggcgggactgaaccatctttactctggaatggaaactggctcagaccagatattgcagttaatcaacaaaggatttgatgcagatactgttgtccgaagcggctgtatggcaaaggacgcggatatgattttatcggaatttatattgttgggaatcggtgggaaggaactgtcagaagaaaatgcagtccacacggctaaggcactgaatatgatccagccagattttattcgggttcacgctacaggaattaagcctgagtcaaaaatgggagagtttgtgcgggatgattccgttactctacagtctgaggaagaaatcgtgatagagcagaaactattcctgcagtagttacaggagatggatagctactacatgaatgaacacatcatcaacctgcttttagaggtacggggaaatctaaggacagagaaaaaggaaatgctttctacgattgatcgttttcttaccttgcccccggatgaaagacttctttttgctgttggccggcggctcaatattttctttttcctagatgatctgaaaaaaacggagttacatcaaaaggcagaagaaagcatgaaaaagatattagataggaatcccaatgtggattttgctgcattatgtaattatgtgcggcaatcacagatttaaacagaaatagcaaagtcgggtatagcgaatgcttatcagctatacccggctctttcttttatcctttgcagcacggagactgcacatccagtccatccagatagcctttcccccactggcataaagtgtccaataccggaataacactgcggccaaattcggtaagggaatagattgtttttggtggtttctccgggatgacctctcgatgaaccattccgcaattctctaaatcatggagctgaccggagagcattttgggggttgcctttggaatgagccgctgtagttccatgtagtggagagactggtttatcaggtgccagaggattaaaggtttgtatttgccgccgattaaagacagtgcggcttcaaccgggcagttaaattgagtttgtttacagttcatgttgtttctccttttctgcaagggtgctaccttttttgaaagtacctatcaaaaaagtgcattcttgcggatgatttcattcatgctacaataagttcatggttggtttgacataccaaatacatgatacaaagaaagggttatttattatggattttatcaatattgcgaagcagcgtcaatcggtacgcaggtataagaatcagaaagtggagccggaaaaattgaatcaaattctggaagcagctcatgtggctccaaccgcagcgaacctccagcctgttcatctgattgccgttcagagtgaggagggtctggcgaagattagcaaggccgctggtatctataatgcaccgttggcgatcattgtttgtgcagatcataacaaggcatggatacgcccattcgatcagaaacaaagtggtgacattgacgcatccatcctgactgaccacatgatgctgcaggccacagagttaggtcttggaaccgtatgggtttgttacttcaagccggatgtactgcgtgaggaatttaactttccggataacctggaaccagtcaatatcctggtaattggttattccgatgatgatccggcagatacgaatcgttttgatgcacagcgtattccgatgagccagttggtttcctatgaaaatctgtaaatgaatacttggcgcagcccctgtaaaacaagcacaggggctgtgcttttatcgctctgaaatatgtgcgtaggtttcttccagtatccagccgatgtgttcgtcctgcaaggaataaaatacgtttttaccaaccttgcgggagtaaaccaggcgtacaatccgcagcgcacgaagctgatgggagatggctgattctgtggtctgcatttcctttgccagatcactgacgcagtattctttttccatcagacgccacagtatccgcatacgggtataatcacccattgctttataaagttcagatagctgctgtaattcctctggttttggaaccataaaagttgtatgttctgttgtattcatgtaatttctccaatctatgtgtaagctgtttgacagataaaatttaaatagttatgatagtttcaggaaggagatgatttttgatgtcacattataatctacctcacaaccacggacagaatattgaacgggtattagacaagatgccttctgttgaaggctttaccaatatagcatttttatttcagcagcttgatgatccgacacgtctgcggattttatggctgctctgtcactgtgaagaatgtgtctgtaacattgcggcggctgtggatatgagtgctcccgcagtatcgcaccatttgcggatactgaaaaaaagtgggatcatatccagccgcagggaaggaaaagaagtgtattactccttatcagacacaccacaggctaaattattgcatcgttctatagatacgttatttgaaatatcctgcccgacaaatcaatagaggaaataccctccgggtataccatgatgtcctgattacaggacgaataagggaaatgcgccgctttcatgttaagaatgaagtgcggcgcatttcggttctcaaatctttttagacctgggaaggcacatccagccgctttacccgcatggcacggattgcgtttaggatggcaatgacggagacaccgacatcggcaaatacagctgcccacatattggcgtatcccaaagcacctaagatgagtaccaggaatttcacgcccaaggcaaatacgatgttctgatttgcgatacggatcgtctttctggcaatcttcatcacagaagcgattttggatggttcatccgtcatcaatacaacgtcagcagcttcaatggctgcatcggaacccagaccgcccatagcgatacctacatcggcccgtgccagtacgggagcatcgttgatgccgtccccgacaaagacaagttttcctttttcacttttttgtttcagcagttcttctacacggtcaaccttatcggcagggagcagttctgtgtatgcctgatctaatccaagacggtttgctaccttttttccaacggcatctgcatctccggtcagcatgactgttttgaggattccggcggatttcagacgtttgattgctgctggagcatctgctttgatctcatcttctatgacaatacatccggcatattttccgccacaggccagataaacaacggtgccgacagcagtagaaggggtgtattggatacgttcctttaccatcagcttggcgtttccggccagaaccgttttaccgtcaatgacagcccgaacgccatggcctgcgatttcctgaacatctgtgatgcggctgctgtcaatttttctgccataggctttcttgatcgagagcgagatagggtgattggaataatcttccgcatatgcggccagttccagaagctgtgtgtctttcatgccttttggattgacttcactgacggcaaaggaacctttggtcagagtacctgttttatcaaagactaccatttccgcatgggccagtgactccagatagttgctgccctttacgagaacaccgatcctggaggcaccgccaatgccgccaaagaaactaagcgggatagagattaccagcgcacaggggcaggagattaccaggaaggtcaaagctcggtaaatccaggtgttaaatgactgcccggtaatcagtggcggcaggatggcaagtgcgagggctgcgaataccacagcaggggtgtagtagcgggcaaagcgtgtgataaagttttctgtccggccttttttgtcgcttgcgttttccactagatcaaggatttttgcgacggtggactctccaaattcctttatggtctggatggtcagaataccagtctggttgatacagccgctgatgacttccatccccggctccacctcacggggcatggattccccggtaagggcggaagtatctaatgcagaagaacctttgaggattgttccatccagtggaatgcgttcacccggctttactacgatagtagagccgatctgtacttcatccgggtcaacctgtaccagttttccgtcctgttctacattggcatagtccgggcggatgtccataaggcttgcgatagatttgcgggatttggaaaccgcataagactggaaccattcgcctacctggtaaaacagcataacggcaacaccctcggaatgttcccctaaaatcaatgcaccaatagtggcaatcgtcattaggaagttttcatcaaatacctgcccatggaggatgtttgtgatcgctttccatacaatatcccatccaacaacagcgtagcagataaggaatacgcccatttctgcatattcaggaagctgtaagaaactacccgaaaagaacagcactgccgctacaatgatgcgtgtaagcagacgcttttgttttcgtgtcataatttttattctcctttcactgcagggaaagcggtgattgtactttccctgcgtcttaatgtaaaaaacaccggctaccaggaaacggcagccggtgtccagcttttcatcacaccttgacagttacatccggctcgattttcttgatcagtgcctttgcttcggtcaggatggcatcgaacttgtcatccggtgcctccagtaccatcttctggttcataaagttcacggatacattcgtaacaccgtcaatctttttcacggcactttcgatctttgcggcgcagtgtccgcagtcaaggtcgattaacttgattgttttcttcataggatgatatcccctttctataagttatttggttggtttgacatggttgaacaattaaaagaatgtttaatcgttcatgccgtcagtatattcacgaaaaggcgcaaagtcaacggttcccagagcggttctgccctttggattggaaaacctgctgattggatttcttccaaaataggaattgctttttggataaaaaatgctcctttatggagcgtacaaaaccgggaaggcgtgtttataatgattgcgttccctacgggggacgggtacacaatcataaaaagaaagaagggatgaaattgcaaaaggagcaatttgacattacgggtatgacctgctcggcctgctctgccaggattgaaaagagtgtgggaaaactgcccggcatcaaagaagtgtccgtcaatctgttaaagaacagcatggttgcttcttatgatgaatccgttctggatacagcagggattatccaggctgttgaaaaagccggatatggggcattccccaaaacggctgcaaatgtccagaacaaaagcagtgccacaggccggactcaaaatccggaaaccagtacggcacaggcagaatataagcagatgaaacagcggctgctgctttctgccttatttaccataccgctgttttatatatccatggggcacatgatgggatggccgctccccggtttccttttaggaatggaaaatgccatgagttttgcgtttacccaattcctgtttctgattccggtggtgtttatcaacttcaaatattaccggatgggatttaagacgctgtttcacggttcaccgaacatggattctctgatcgccataggttccagtgcggctgttgtttatggaatttatgccatatataaaatcggtatcgggttcggtcatggtgatatggcaactgtccacagttttatgatagatttatattttgagtccgctggcatgatcctgacattgattaccttgggaaagacattggaggcccgtgccaaagggaaaacttcggatgcgattaccaagctgatgaacctggctccaaagacggctacggtagagcgtgacgggcaggaaattgtggttccggtggaagaagtgcaggccggggaaacgctgatcgtgaaagcgggagagtccgtgccggtggatggaattgtcattgaaggattttcttctgttgatgagtcagcactgacaggcgaaggcattccggtagagaagcatatcggagataaagtcatcggggctaccatgaataagtccggctattttaagatgcaggcaacgaaagtgggcgatgataccaccttgtcacagattgtccgtctggtggatgaagcgaccagctccaaagcaccgattgcgaagatggcggataaggtctgcggtgtgtttgtgcctgtggttatcagtattgcgctgattgcggttatcgtatggctgctgatgggttacgggtttgaatttgccctttccatcggaatttccattctggtgatctcctgcccctgtgcgttggggcttgccacacctaccgcaattatggttggaaacggaaagggtgcgacaaacggcatcctgattaagtctgcggaagccctggaaacagcacatagtattgatacggtggttttagataagaccggaactattacacagggaaccccggtagtcacaaactttttatgcggggacggtgtaggccagaaggaactgctgcagatagcagcttctctggagaaactgtccgaacatccgttggcagacgcgattgtggcagaagcagaaaaagaaaggatttcttttcttcaggtaagtgattttaagcagattcccggacagggcattgtaggaaagatcggaaacgagatctgctatgccggaaaccggaggttactccaggcaaatggcatttcgggtggggcactcctgcagcttggggaatctatggcagttgacggtaaaacaccgctgttctttgcccgtggcgggcagctcattggtgtcattgccgttgcagatgtgataaagcctaccagccgtcaggcagtacaggaattgtctgcgatgggcaatgaggtggtcatgctgaccggagataatgcgaaaacagcagaagcgatccggcgtcaggttggcgtggacggtgtagtagccgaggtatttccgcaggataaggaaaaggaaatccggcgtttgcaggatagcggtaagaaagtggcgatggtaggcgatggaatcaacgatgccccggcgcttgccagggcagatgtaggcattgccatcggagccggaacagatgtggcgattgagtcagcggacattgttctgatgaaaagtgacctgctggatgtatcaacagcgatccagctcagtaaggcagtcatccgcaacattaagcaaaacctgttctgggcgtttatttataatatcatcggtattccagtcgcggcggggctgttctatttgccgtttgatttgaagctgaatccgatgatcggggcatttgccatgagctttagttccgtgttcgtagtatcaaatgcgctgaggcttagatggtttaaagcaaaacatgcatctcatgcggaaccaaatgaggactgcgtgtatgaacagacaacaataaaaagtgaaagcaaaggagcgattcaaatggaaaaagtattgaatattgaaggtatggtttgtatgaactgtgtgaagcatgtggataaggcacttcgtgaaatccagggtatgaaagatgtgaaagtcagtttagaggacaaatccgcccaggtacagcttggagaggatgtgtcggatgatgtactgaaagccgctattgaagatgccggttatcaggttgtaagcattcagtgagcgggctgtctatgaaagcaaaaaagagtgacattacccataaactgaagattgccagagggcagattgacggtatcctgcaaatgatcgaagaagatcgttattgtgtggatgtatccaatcagcttcaggcaacacaggcattactgcggagtgccaatcaacagattttacaggcccatatccgaagctgtgtccgggaggccctgcagacagatgtggaaaatcctaagttggaggaagcgttgaaactgctggagaaaatggcacaatgatacagggagcagagaggattggaaccctttctgctcccgattttacttccggttggattgtaattcctccggttaggagcgtacaaaacagcccggattttatatactttatatggttagacatggctaataaaatagaccaggaggaataagtgatgaaacaggcacttgatacaagaacaaaacttttaacgaaaagtccctggccgcttatgatagaactcagcattcctgcggttcttggcatggtggttgttgggctttataacatgatggattccatttttgtaggccagatggtaggagcagcccagatgggagcagtatctgtctcttatccatttacactgatcaatgcaggctctgccgctatgttaggtgtaggctccgcatcggtattgtcccgtgcgataggaaagaaggatgagggaactataaagaagattatgggaaatttagtcgcaatggttctcttactgtccgttatttataccgtagtgggtatggtgtttacccgccagcttttgactctggcaggagccagtgacaacattttaaattatgcagagaaatatctgcgtatcgtgtttgccggatcgctgttcgtaaacttcttccagagtgcgaacatggtcatccgtggagaaggacagctgaaaaaggcgatgagcattattgccagcggagccattttgaacattatccttgatccgatctttatcacggttttgaaaccttatggcatgggaattgaagcagccgcttatgcaacgattctttcccagtttattcaggctgctgttactttgtgttatttcaaaaagaaaagtccgaacgtaaaaatcggacgcatccgtattgatggagagctgcttccacaggttctttctgttggcgtatccgcacttttgatgcagattctgacactggtacagcagacggtgatctatcgtgtggcatcaaattacggcggggaaacttcccagattcttttgggtgcggcactgcggttctggaatttctcctttgttccgctgtggggtatcagccagggcttccagcctgccgccggtacgaactatggagcaaaagagtatgatcgggtaaagacactgacgaaagtatttgtggtcgcagctacggtattgtctttggtattttatatcccggtagaactgttcccggataaggtactttcgatgttcattacaacgccgggtgtagcggcttctggtgcggcaaattttcgtattatgttcagcacttacattctccagggaagtttcctgattgccgtgacgctgttccaatctttggggaaagcaaacaaggcgacctggctggtactgttccgtcagatcatcttgtttatcccgctttgcgtgatcctgccgatggttggcggcatgggtatccgtggcgtctggctggcgattgccctgacggacgcaattctcgtagtgattacgatcagcatgatgctttctgagttccgtaagatgccggctgcagcgaaagcaaagcggtaaggagggacatctatgtatctttgtgatggaaagataggaaaagaatataaggtggtggatatgaaccttcccgtaaatatggaaaaacggctggaagccctgggaatgacaagcgggacatcggttgctgttttaaacagtaagaacaaaggcgtcctgatcgtgaaggttaggggaacccgttttgcccttgggcgtaacatcaccaaaaatatcgtagtggggtgattcgatgaaagagaatttgacaatcggcttcatcggaaatccgaactgtggaaagaccacgcttttcaacgcctatacaggtgcgaacctgaaggtggcaaactggccgggtgttactgttgaaagggtggaaggtgccataaaggaccatgacttgaatatccgtctggtcgatcttcccggcacttacagcctgacttcttatacaatggaggagcaggtatccagacagtttatattaagcgatgaagtcgatgtgattattgatgttgcagatgcttcggcactggaacggaatttatacttgacgttacagcttttggagcttggcaaacctgtggtgctggctcttaatatgatggatattgtggaaaagcggggcatggagattgatacacacaggctgccggagatgttggggattccggtaattcctgtttccgccaggaagcgtaccgggctggatgtgctgcttcatgcagcggcacaccacaaagactgcaaggccccggaatgcctgattcatcatcataaatacaagccgaaacatcgacatgaccatcatgcggaatatgcgatggtttacagtgatggtatcgaggataagattgactttattatagaagtattgaaaaagaaatatccggatttgacgaattaccgctggcacgcaattaagctgttagagcaggataaagagattacaaaacggtatccggtcaacctgccggatgtgattgaccgcaattatgagtcggacatcatcaacgagaagtatgattttattcaggagatcatcaaagaagtattggtaaataaagaccggcaggatgctttgacagaaaaggcagaccgggcattgacgcaccgtttttggagtatcccgatttttctcggtattatggcagtggtgtttttcctgacctttaccatcggagattggctgaaaggatatttagaagtaggaattgaaagtctctccagtacagtcagcgatggattggctgctgctggagtcagtgaaatgctccgttcgttattggtagatggcattctcgctggtgtgggcggtatccttacctttttaccgaatatttttatcctgtttctggcactggcctttttggaggacagcggatatatggcccgtgttgcttatgtcatggaagggattatgagtaaacttggtctttctggccgggcgtttatccctatgatcctgggacttggctgtacggttccggcaatcatggcgtcaagggcgttggaaaatagacgtgaccgttttaaggtgatgctgatcacaccatttatgagctgcagtgcccgcctgccgatctacatattgttcgcagagatgttctttaaagaacatgctatgctggtagcttattccatgtacctgattgggttggtggttgcgattttggtggcggcggtcattcatctgattgaccggaggaagtcagaaaactatctgttgattgagttgccggaatataaagccccaagtgccagaacagtagcgatctatgtatgggaaaaggtgaaagactacctgacgaaagcaggaaccacaatctttgtggcatcgattgcgatgtgggtgatcttaaactttggaccgcatggctatacgacagaaatggcagacagcttcggagcaattctggggtatgggcttgtgccgttcttcgcaccgattggtctgggattctggcagatagcggttgctctgattgctggcatttccgcaaaagaagtggtagtttccagttgtgccgtcttgtttggagttccgaacatcaattccggggcagggatggatacactggttggcattctgggtgctgcaggatttggacagctcaatgcgttctgtctgatggtgttctgtctgctgtatattccctgtgcggcggcattggcaacgatacggaaagagtcgggcagtacccggtggatgctgttatccgccctgtttcagttagcagtagcatggattgtgacatttgttatttatcgtattggaattttaatgtgaggtaaaaagatgaaatcaggaaaatggatttgtatagcagccgttcttgtaatgaccggcatgatcggaaaaaggttatttaagaaaaacgaaaggaatgcaggctgacaatcgggcggcctgtgggaggataagcatgggtatcattgattcagtaaaaaatacagctttttcaaccgctgtgaaaacggtgatggattatttagagaaagatccggaaaaaaatattcccaaagcaatgagcatgatggataaggtattaccggatgggtggtatgagggacagcgagctgcatttcgtaaagcaatcgcagaaaaaggcaactggtatcagttgattatgaaagcatatcaattggatgaaggagtgagaaaaaccttctttcagaattttattgtcaattcagccctgaaaggttctgccattcagaatgagatcagggaaagggaaaactgcaatgtgccgtgggcgattctgttagatcccacttcggcctgcaacctgcactgcacgggctgttgggctgccgagtatgggcataagctgaacctcgatctggagaccattgacagcattatacgccagggtaaagagatgggcacttatatgtatatttacacaggcggagaaccgatggtccggaaaaaggatttgatcacgctgtgtgaacgccatccggattgcgagttcctttcttttacgaatggaactttgattgatgatgccttttgccaggaaatgctccgggtaaagaattttgttccggcaatcagcttagaagggtttgagcaggcgaatgacggacgcaggggacagggcgtttttgaaaaagtcatgcgggcgatggatttgctgcgtaagaataaactgccctttggcatttctacctgttacaccagtgcaaactatgcggacattagcagtgaagcgttttttgatatgatgattgaaatgggagcgatgtttgtctggttcttccactatatgcctgttggcaatgaggcggtgccggagcttctgcccacaccggaacagagaaagactgtctatgaacggataagggcatttagaaacacaaaaccgatcttcagcatggacttccagaatgacgcagaatatgtaggcggctgcattgccggaggacggaattatttacatatcaatgctgccggagatgtggagccgtgtgtgttcatccattactctaatgtgaacatccatgagtgcagtctgttggaagccttaaaaagcccgatctttatggcataccatgacggccagccgttcaacaagaatatgctgcgcccctgcccgatgctggaaaatccacagcttttacgagagatggtgaaacgtaccggggcgaaatccactgatctgcaatccccggagagtgtcgatcatttatgcgataaatgtgaggtatatgcaaagcattggaagcttacggcagatgagctatgggctgccagtgggaaaggagaatagaatgattgttaccggaatcattgttttaggagtggcagcttatgcggtatgggctgtccggaaaatccacagagaccgtaagaacggttcctgctgtggcggcagctgctccggctgtgtagggcaagaatattgtagtaaataattggtcatgggctgatgctttcttagagggcgtcagcccgttttctctgtttgcactattggaagggttataatataatgctaaatggattgtaaatccttctgattggagcggtgcgaaatgagaaaaacttatataataaaagataccagagagattctggcagagcaaataaaaaagagcggattaatagaaagggatgttatgagcgaaaaccctattacaaatgcaaaagggttgtctgcggtcattccaaaagataatgatggatattgtacggtttataaaatggactgtacagatggtctaggattgatgacagtttaccaggtttatcctggaatacagcttatttataatgagtttgaagccacaagctgtgactggaaaggaaatctggataagaatatattagaaatcaatcactgtcgggaagggcgggaaggaagtacgcttttaagcggttcctgcttgtatcttggagagggggatctttccattcacacaatggataattgttccccggagatgagttttccattaaaacattatcgtggaatctctgtggtaatcaacctgaaaatcgtagcagaaaacccgccggaaatcctttctgagagtggcattgacattttagattttaaggaaaaattctgtgcggatgggaattgttttgttatgcgggcaaaggatgagattgaacatatcttttctgaactttattctgtgccggattgcctgcagaaacactattttaagataaaggtccaggagcttttattattcctatgtatggtagacgtatcgaaagaaaagcagcgggagcagtatacctccccgcaggtagaagttgtgagagaaatacacaaaaagctgatttccaatctgcaggtgcgccctacgattgaggaactttctaaagaatatctcatcaatacagcaacattaaaagatacgtttaaaggaatttacggacaaccgattggtgcgtatatgaaagaatatcggattaagcaggctgctgttctacttcgacaaacgcagtacaccatagcagagattgcaaatcaggtggggtacgaaaatcagagtaagtttgcgactgcttttcgggatattttgaaaatggcaccagccgaatatcgaaagcagaacagtagtgactgatttgtttgaaagggaaaccgtaaattaagactatggatgccatgtatcaagaggcaagatacaaaattggtatgaggctatggaatatagagatgccctggagtaacgtgagaaattactccggggcatttttcagttttagcgtcatattttgtcgaacgattttcaaaattttataccattcataactcatcaataactcattcataactcggtgttttataatggcagataacgagaaaaaccagcagcaacaagaagttcttgtcctactggtttcactcagatttttccgcatcggactcgctgtgctgggtgagaaactgctcagtcatacagtccacggtgttctgtctggatatgtccattacagaaatcatggaattggaagcatatcagatttatttattaggattagggtgtcaaaagacacattttaatatttgattttgtttgcaccttgaaaaattaacacgaattgatgaaagatatgatttttaaatctagcattcattgatattttgaaactgtggttcattgattttatgctgttttcttatttgaagcatactgatctaagctatttgtataatctaatagcttttgaaaatctaatgctgctattttaaatctgaagaataatcgagtacgttttttcccatgtacaggtatcttatccacgtgatacctccggtggagaagagatggaattgcctcaaccccatttctaaatcttgcatattcagagaattcttccgtttgcatatattgtaattgtttcgctcgactaactgctttccaggacacttcctttcggactcgtgtttttagaaaacgtggttgacagcgttctttgtaaggacattcttcacaatcgcttgtctgaaaatatgcaactgaacgatcattgccctgatcataaatacatttttcgggtacacaaccattcttacatttgatgagatatttaccatcatctgtaaaaacaaaatcggcatatatttcatctggtttacgtcctgtgaaattggttgtaaccagatttagattgtgttcggatgcaagacgtgagttctcttctccactatatgctccatcggcaacgataaaggcgccatcagaaaaatcattttttccatcaagatagtctttcataaactgattatctgcgtatgtgttttgttggtaatcgtaatcagtgactaaactaccgttttctccgacagattcaaccatatttccaacatatccaagatgtttgccgcctgctttatatctaaaagtagcttccggatcagcaggattaagtaatacttcagaaggattttcaatctcctctttttggcgaagccgtcttgaaccatcatcaatgatagtacgttctcttaatagacgaataaggagctgatattcacttgtatcatcgaaatcacctgttgaatcgcaaatttttattaaaacatctgcatctttcattacaacaatggttctttctgtggcatccatatttcgtttgtgataaatgcatttattataatcatctttttcaatataatggtgttgttcatctggaattttagttccacgctcatccattattttgcaaagattagcgacacaagtgtaaaacaattcaagcaatgagaggtttctaatatttgcagcaaccattaagctgtccatacgttgtttatctggagtgatattcataaagtcagatatttcttttgccatttttacaacgcattcatgaataagatcaacatcatgctctgtttcataagcaagtactcgggctctaaatcgactaagcgttctatcactaattggttgttcttcaaaactagttgtatgcaaagcatactgatagcgaatatcaaatgccatagcttcaacaatctcatcgtcagtaacattaagagcttccttaagaattagtgccccaacaattacattgactggagtgttaggtctagatgctttttcactataaagaacagaaaaaatgttttcatcaatagcaggaaaaactttgtctgcgaaagtttttgcccatgatttctctaacattcgtttttcacgttctgtaagattaaaagtactatctaaaagtgtaagttgttgattatcatttttaacaaaagacatatggatcacctcacaaaatcttacctatattttaccagagaatccaatgtttttacatatcgtgttaagttttcaaggtacaaatttatatcaaaggttataaaccttttgacaccctaatcttattagtaaaaaaagaaagtataccctgaagtaaacaatttaaggagaagaccccttgtaaggagatgatagtaaaatgaagattctgatgattgaagcggaagacacaattttacaggatgtggttacgttcctgagcgagaaaacgagttgtcatgtcaggaacttatctctaactacagattctttaaacgtacttaccttctccggtttggagatccacctgcaggagcagatggttattcataatggtgaccatattcccctttcacattatgagtttcagacacttgcttatctggcacaacatccgggatgggtattctccaaagaacaaatttacgaagcagtttggaaggagaatccaaagcactgtggcagtgcagtagtaaatgtgatcagccagcttagacggaagattggagaggagtacatagaaactgtaattaatagtgggtataagttcataggataaaattaaaatgccaatcccagaggacaatcttctgggatatttcttttccagcaagttgcgttttgcttatcttctgcatacagagtaagtagagcatatttcaaaaagtgtacaatttggaatatggaaaaagagacgtgaattatgtaccgaaatgtatggataaatccttttggaatattccagaagaaatgcctacattttggaacattcgcagaagggagagcgcaaaatggctatatatggttatcacaggaccagcaccagggagcagcatcttgacaggggaattcaggagatacggcaatactgcaaggaacacgaaatggagctgaaaaatatctttacggatcagcagacagggaagaatttcaacagaccaagatacactgttctggtagaagatgttctgcgttcaggagatattttgattattacggaattggatcgattgggcaggaataagaaagataccatggagcagatccgacgactgcagggaatgggcgtgcggctgatggttctggagctgccgactacattgatggacatgtcaaaaatggataacaccatggcttgtcttatgatggaaaccatcaataatatgatgctggaactttatgcttctatggcacaggcagaaattgagaaaaaagaaaagcgtcagagagaaggcattgaaatgaagaagctccgtggggaatgggatgattatggaagacctgcagcaatcgaggaagatgaatttgatgtagcatttttaaaagtaattgccggagagatcacaccgacagagcttcggaaagaattgggattatcccacacgacgttttatcgctatcgaaaaaaatatttagaaaaacatcctgagattttgcaatcaccagattaacgtcactattactaagtataaaagataatttttcaggaggaataatagaatgagcgagaaacgagaaggtaatcttttttatgacaaggaaagtggacgttatgatatccgatttggaatggaatcatattatggcggtctgcattgtggagagtgttttgaagtaaaaattaatgatgtctgggtgccggtccggattgaaatggatgaagactggtatctggtgggactgccgctgaaaaggcttgatggattaacagtccgcatgtgaaaggagtttcagatggcagccgtgcagaaaaggaagtatgaaaaaccaatgataaagtttgtgacagatatgaatattatattggaatgtctatatgaggtgtacggacaggaagaacatcatgtacttgaaggaaaggatattcaaaaaacgatgatttttccattcctgaagatgttagagaatcagtgcaatggaattactgtaagagagatacataaaaaattatgggaaatctatataacggaacgaacaaaggaaccgtttatcagtaatgcagagtctcttttgaaaccgttgaaacgaccggaggaaaatgtgaatgtactataataataacagaaaatcatgtggaaacaggccactgaataagagaataccgctagcggttcaagaggtccagaaacagtacacagtggctttacaaaaactgtatgatcaaaatgatttggaaagcattttatttctgcggattgctgcagaaaccggattaagaatgcgtgatatttatgatctgaaaccatctgagattattgtaaggaagatttataaaaaatcattgaagactggtaaatatgaggattacccgttgatttcagaagaaacagggaggattgcagaacaattagtggggcttcaaggcagattttttagcagggattatcagtattatatgactaagattaaaagacagttcagtgatcctaacatgaaattactttacattgtacaatgcagaagaaataagaatagggttgaatgttatgcatgaatcctaaatgaaaaagaaatggatatttccatcagatagtagtatgataaagatagtaaagattttccgtggagaaagggtgatggttatggcattggcacaggttacaaaatctcaagaagcaacttatacaattgatcatgcaatggatgtcctgctggcaaagctggacgaggcgattgacgatatggaaaatggcagagtgcagaccatcgaggaagcctgggaggaaatcgatgcagtataaggaatgcaaatggaaaataagaaataccgtgttgtaattgctgaaagcggtaaatgtgatgtgaaagagaaaaagaaatatattctccagcatttcaaatatcgtgaatatgcagaaagcttttcgcaaaagataaaagcagcagcaatgcaattaaaagtatttccgacaggatatgaaacgacagggtttcagtatcgaggttacgatatctatatgaagccataaagtaatcatttgctgttttatactattgatgaaagaactgcaacggttacaattcttcgtgtgcttcaggatggtatggattgggaatacataataaaacgctggataaagagaaattcatagaggataaggcagcattttgtgctgtctttttctatcagttatctggcgaaacgaggagagattgaaatgtgtggacgatattatgtggatgatgatacagctagagaaatagaaaaagtggtccgggaggtggatgagaaactgagaagagagcgcaggggtgatatttatccctctcagtctgcaactgtgattaccggaaggaaaccacatcttttggcagaagaaatgtcatggggctttccgcaatatcagaaaaaagggctgctgatcaatgcaagagcagaaactgctctggaaagaaagtcgttccgggctagtgtgatgcacagacgctgtatcattccagcaaagcagttttatgaatgggatccggataagaataaagttactttcctgagagaaaatcagccggtcttattcatggcaggtttttacaatcgctttcaggatgataatcatttcattatcttaactacccaggcaaatgaatcggtcagtccggtgcatcatcggatgccattgatactggatagatctgaattggaagattgggtatatgaagacacgtttttggaatatgcactgcataaaaagccgccacagttggcacgaaggcaggactatgaacaacagagtttatttttaacgtaaaaggagccgtctgaatttaatcaggcggctcggtgttattttatggcatttttggttaagcacacaggagttccttacgatcccgagaataaaagtatgcatgatctgaaagaatttcttctgggatgaccgttgtttcattgacttcccgaatgatttcgtttaattccatgcaatcagtatcagaagcttttaataacagaacttcatgtacgctgctgggaatgacaaaaaaatcatcctgtaatgttttaccgatttgattcatgatatcatcatacaatgtacagatagcaccgtgttgtcttatagcattagagagtatgaacaattctgatttcatgacacaatctctgtctgaatctataaactcatttgagttaggaaaagcattttgcagaaaatcagacataggtgtgagttcagccggaaagacacgaggagtgttttttcttgcatctgagaagatggtatttagatcttttccccaggtcttcagatgttcatttcgaattagaaccgttgccattctactatccttacagtccaaaagtacataaaagacaattgccagatccaaatatggaatatgcggtatgtcttttagcagggattgatttgccttgaaattgactaatttgtagagaatcttttcctgaagtttttcataatcgagcagcatttctgtgttcgtaaaggaaacatctgcagcctggtgatacagctcaacaatatcttctgcaatctgagaaagagattttccggccagatagaattcataccattcgtccagatacaaaacagggcttatattggatgtatcattggaaaattcaattccatgcttcaaggtgttattgttcttagtcgttgtgataggattcaggctgatatgggaatcaagcctgctttccagttctttgagtaatgtttcttgaaattcgttgtaattcataaaaatctcccttctggtaaattattgggcaatcatttttgtgaataattcgtttgtccttccctccttcctgcgtttaggcaaaaaaagagaatggacacaaatgcgttcattctctaacatgctgcagattcctgcaaaataaaaaagccagaaggctctgcactgtgatggcagagtaatcctcctgacttatatacaaacctaaactgcgtgtgaatatctattacggatgacacaaataatgattacaaaattattttaacactatatatagaagatgtcaaataattagaaactatatattgtatatacaggacttttataacatcaatgattgtaaaaaatatcagatgatgtgtagattccatattttcactcttgtaaaaagaacaccagttcgatataataatttaaaaggaggcgaacataagtttgaataaagtgatttttcatattgatgtgaactcagccttcctttcttgggaggctgtttaccgcctctaccatttaggcggaaaagtagatctgcgggatgaagtagcagctgtcggtggagatatggccatgaggcatggaattatcctggcgaaatcaatcccggcaaagaaatataatatcaaaaccggcgagagtattgtggaggcacttcaaaagtgtccgcagcttaaattggttcctccgaattatagtttgtatgaaagatgttccgctgcttttatggagatccttcggcagtactctccggatgttgagcaatatagcgtggatgaggcatttgttgatatgaccggtaccgaaagtttatggggagaaccggtcactgcagccaaccgtattaggaatcaaatcaaggaagaattagggtttacggtgaatgtaggggtatcggagaataaattgctggcgaaaatggcaagtgattttcaaaagcctgaccgggttcataccttatggaagcatgagattgaaatgaaaatgtggtcgcttccagtaacggatctgttcttcgttgggcgagctactgcaaagaaattgtttcatatgggaatccatacgattggtgagctggcacagtctgatccgattatgctgaaaagtcatttgaaaaagcatggagaggtgatttgggcatttgcgaacgggatggatgtttctgtggttcagtcagaagctccggcaaataaaggatatggaaacagcaccaccattgcttttgatgttacagatgtatctacagccaagctggttctccttgctttggcagagacagttggaaccagattgcgggcggcaggcgtccgtgcagaggtaatcgccgtcggaatcaaaacatttgatcttcagtatgcaagccatcagatgacattgaataatgcaaccaacattacgatagagatccatcgttgtgcatgtcagctttttgattctctttggaatgggaaagcaatccggcatctgggcattcataccagcaggattaaggatcatatggatatgcggcagcttgatatgtttgatacaacggattatgaaaagctggagcatatggatgcaactgtagataagattcggatgcgttatggcagggattctttaaaacgggcagtctttgtaggaagcaggattgatcacatgtcaggtggtatcagtcgggaaaaacgtacagttgattataagaaagtaaaagtagaataggaggtggagtttgatgggttttgcaatcggtatggaagaggaaaaacatcaggagcaagcaattcggggagtgccacataaggttgcagcagactgctggtttaccagcaccggtaaaatgatccccagaatgataaaatatgaggatactgagggaactaggcatttactgaaagatattgaagtgctaaaatctgataagaagcattatgcgggtattctgatgtatcgatatgactgcagagcagttgtgaataatcggatgcagaactttatcctatgttaccatccggaaaataatacgtgggatatgatattcccggaatagaaagaaggtcaatatgattacattacgaggcgtggtcgttactgatcaagtaaatcgatatggagaaaaattagattttaaaggcttgattaatgcgtattcggatgcatggaaaaatggattccctgtaagtttaaatcacgatcatacaaaatgtgtgggatggtctcagctaaaaggaatttatatggaaccaggaatcgcatatcagacaaatggtatatggatacctgaaaatgatactgaatacaaaataattaaaaaacatgtttacaattatcaatatgagcaaaactatttaaataaaaagaaatactacgaagagttaaaacagaaattggggagttgtatttcaaatgattataaatggctatgggcagatgcaattacaatacttgattcagggattgtgtttcgcgtgttccccgaaataaaagaaactatgaaggatggattgattccattaaaagaattggagccgatctctccgggagtttataaaagggatgaatttttaatttttgcacatcactattttcgaagaaatttatcacgactaaatacattgaacgttccatttttaagccgtttagaaaaattaaaggatgaagatttagaaattcaagtggctattgacccagatatgataggattagcagatactcaagttgaaaaacgggaatatcaatattggtggggaccaagttttaatgaagatttgactctaatcccattaggagtaactagacatgaaaatgagaattataatgaattaatgtcaaatattcgtcaaacagagttctattggcatatgcagggtggtaaacaaacattggaatgtgaggaacttacggatataccgaatgttgaagatgattatggttgtcgttatatacatagtatgattaatccagaaaatggtttaccagatcatcttgacggagcgataagagcatatgatgatgaaaagttattgaatcgatttgaaataagtttagatcatgctccaaagaatacgaaatattttaagttgtggcgtatagataagcccatttctgttaagttatggaaggaattaatttcgcattattttagagacaataggctggtcggagaatattttggtggagtagataaaaatgatcaaaaagatcttgtagtagaaaagaaaaaagataatacatatacaccgcttaaagaatatattccatgtgatattactgcagaaaatgggattagagctacagttcagtttcatgataaatttacaatgaatgaagagcgggatgtaacgctccgaattagtgattttttcattatacctggtagaaaagaaaaatattatgaagcagaaacattgacctttataaaactacttaaaagagaaggagtgaatgtcagagtaccctatactacgagaatagcatacgaagatttgatattcaatatgccaatctttatgtgtaaatcagttgagagtgcagagattgttcagaactgcattttgaaattatgtaaggcgtggaacagatggacaccagattctgatcggcttttgtcttattccattcaaattaactatatggataaaagtgtactgctctcatttgcagggaacacagtagatattgaaaaggtcatgagtatacttggaactaaattgccagaagaacaagagctaccccaatggtgtgatcgactaagaaattgtataaattcatatggaaaggttaacgggcaacccaaattgacggatttgatgaggtcagatggtacacttcattttgaacggaagatggttccgccggaaatgattgaaaaaacagattgcggtcataaagatgtgtatgctacgttaaaattaaaagaagaggagtataacattattaacaataacaacattcaaatagcacctatgtataaaatcaaaaatagtaaatgtaacaaatgcggaaaaccttattttcaatgtgattgtattaagtttatagatgatgatgttacagaagaaataatagattttgaatggttagcaatgtcatggacacttcatcatgcataattatgttattggcaaaagagccgtccagatgggcggctcgtagtaatttgatacagaatatgacgaccctgagtttactaatttttggggatataatgttgggatggtatcgtaagatcaagctcggtaatggaccactccaaccagtcaccgtgaataacagcacgggcactgtatcctgatatataagtatactctttttcttcctcggtttgataaacgtcttcaagaaccatcttataacttttttccattttctcatatatttcctgatagtcagtggatatggatggatcattgagcgaatccccataactgcataatacataaactttcataaggctttcctttcttctgttttggtgtaaatcaggagcttaccttttagatccaactcccggtctatccagtggtcattttcatatacttgtttcgtgagtgtattgtagataattggttccttttcgatatcgtcaagatctgccaccagacagtttttcctggcaatatagggatatagggctgcctctacttttttccgtagttctaaagccatcagatgtataagagtgacatcataggtctgtgacatacagtggctgatctgtttgatcattcccgaatcctgaatcgtctgattaactacatctgcctgctcgtccattgacacgtcaggattaatcagtaactgaccggctacaattgatttgacaaaggcagtggctgtttgatttacctgtgcaattaattcctcgtaaggaactttataataggttttcaggacatccaaagggacattctctcggttctgctttagtttggaaagcagcttttccaggctgcttcccagttcataagtagtcaagcacacatcacctcagtttcattcggtacgttttcatattttagggtgtaccgggtgttacgggtttcgaaaataatgctgtttccggaaacttccagaatacgttccacagcagtcgtcatgaaagtatgtgtctgagtagaaatccatgcacgttctccgattcgaagcgacaggaataaggttccagttacggtaattgcctttttttcaatgttgcttattggtctgatattcgttcttttcatggtgatcacactcctttttaacaaaattctttctctaatgtttttgccactaaccttgcacatcccatttctatctcagtaagaggagttttggataaaactgccagagtaagagacagttccttgtcattgcggattggaaacagtgccgctacgggttccctatgatgggaaagcatataaagaggctgactgatatccaaaactgcctcatttccggaggcgatataaggctccagtttttccggaagggaagtgccttctggaagatatgtccctgttgctgcaatgacatactggtctgtgcagataaaagctccgtgcttaatcgaactgtaaagaatggaaagaatgctctggagttgtatagtatcctgctgaggctcccgacatttccgaatccggatttcctgattggataattcaacttcaaggggatttccattctctaattttaaaagtctgcgcagtttcgcaggaataacgatgcgtccctgcgaatctatggtgcagatgtctgagtatttcataaaatcacctttctttctaaaagaaaagaagcagcaaatgccgcttccattccataaactttatgcggcataaggcgatgcctgcgccgggttttgatattgtccgttttgttgactcctttgagactgttgttctgcataagcacgtttcccatttgaaataagggaaggtgccatacaggattcccagttggtaatgtaagaatccgtgcgttttagtaacgtatacaggtccatatccgttagctggataaaggcgttcttttctaaaataaaactcccggatttcatataagatcctccattttgatttttgaccttgatgcctttgccatttacgatctgaatccgccaggggcttttcattatccgcccgttctggtcatttacatgccgggaaatagaaaattgctgtgcaatggagtagccctgtgcatcaggatttccgtatattttgctcagcgaccattcaaattcttgaaagcctgcggtgatcctggttaagaaaaactggatctgttccggtgccagattgaattggacgatgatatttttgtttcccgtgccattggaataatcttgtatagtgatccctatcagcgaattgacattatgtccgttttcctggtactcacctttggcatgtatttgagcataactggtcagtggtgcatacctcagccgatcataaacagcaatgagttttcggtccgtttgcactttatagatctgctcggagatccgtggtgattgattctgattcatggattttcccttctttctacttcaggtattgtttcactaacagtgtcatgttttttggtaagtcttccagttttgtaatatccagaaagccattctgatagatccgcttgatattttccttatcatctccgatcgctgcagcaaagagcttgatcccttttttggaatactcctttttaatgccacgcaggtcggcttctgcttcagtgccgtaatagccggtatctgcaggctgtccgtcagaaatgatgatcagaagtttctgcttttccggacgttttgccagatgctccgccacaaagcggagagcagcaccatcacgatttccgcctcttgctgacatatccatgagccggtagcggtctgatgtgtcgatcgaatcaaattctgcataggaataaagttctacgcctctgccaccagttgaatggccatatatagtaatgggcacctgaaggctctggcagaaatcataaagcacaatggccgtctttttcgcgtgtgttatacggtctccccagctcattgatccactctcgtctaccaaaagtcctactgcaagtttctgctcttcagaaggaagcctggttctggtgaaaaaggttccattttcgtggtgcattgcacgtgtatccagacgttttccaaactgcaggttctttaattttccgccctcactttcttcttttaaaagtggtgcgatagacttctgcaggcgtttggacgcccggataagcattggtgctacagcctgatatgactgttttaaagaatccggtacatatgctattcggttgatcgtaacatgaactccggtatgagcattcccataatggatatcgtttgctgccttctgaagttcttcggtcatttcctgttgatattgtgtttctgctttctcagtagcgatgccatttaggatccggaacaagtcgttggcagacttttcataaccggtgccaaggtactggtgattataagtaattccaggattattttcgtcaaggatggtatttgttttcgcaagtgcgatccggtttccttcctcggttacaacattttgggcggcctgcgtactatcctgacgcatggcaggcggagtacacggtaagggatttactttctgttcttttttcccttcttctgcctgctttggcatagtaccgcctttgccggaaggcaatggggtggcaccatggatctggttacccagaagttcctctaacatctgacttgcatccgatgcagaatgctgctccattctttcttttgtttcttcgatcagaggcttgatgtattcccaaagaatagccacaatgtgattagaagcgtaaaaacggtcttttgtttcatctgaataaatggcatcatctacatatggcatgcagtattccagataatccagataaggacctttataaccggacaggttattgatggttcccgccctgcagtattgaagcagaagatttgccatgattgcaaaatcagaatacttcttttcaatctgactctggatcgatggcatcagttcacacatccgcaggttattcagttcaatcccccggcggaaagtacccggatgagaaacacacattcgtgcttcgatatagatatcttccagaatattattgatatgagaggcacaggatgccagagtcaggcaggatgctttatctttgttgtccatagcctccaatatttcttcacaatttgcctgataggataattccgtaaaggaaggattggatgggtagaaagctcctttttccatgctgccaagatatagtcccaaggctgtaaaatctgagaacagcaggtgggcagtctcatgcccattgaatccgacaaggctttcggaacggagataccgggaaggaaaactctgggtgatttcattggcagcattgatatggattttatagttatccgtatgtgcaatgcctgcatctgcccgggcatcccattccatcagagtctgaagcccctgacgatagcggccggtagccgctttcgccatagaggtcaggtatttttggtaagcagatgaagtgaacagttcctcgtcactaattgtaagttcctgatcacgtatcatctgttttaattttttctggttgctattcaattattattcatcctttctttttaaaataatttttcagtcaaaagctcttccatggtgtatccgaaatagactgccagatggtagaccacaaatacgggtggaaagcctcctcctaattcgtacttacgataagattttgttggaatatgcagaatccttgccagggttttctgggaaagattccagcgtggtagtttccgcagataatggatatttgcggagaaaatatccagcatatcttcttctgtaatttttaaattgttataaggttttctctgtgtcaatgtaccaaccctcctatgctgcaagaatagaatccagacagccggtttccacttccgaacggctttctgcatctgcagataccgaagagaggatcgtgtaatgtgctgcttcccggacatcaccacagaccatataggattgcacccaggaaatcagttcacgtacaccgcagcatccgtctgtgatcagattctcactgcaatattcagaaactgccttgataatctgtgccatagtgcgaaccgtttttttatctgtgcatccggtaatcccaagaacacgctgtaccagtgtttcttcatccggctcatccagatcgatcacaagattcattctggaaatgacagactggttcatctgtttacagccagcataatcattgttggttgtaacaatgatggtcgtatccggatgacgtttgatcacttccccgtttggcaaaaaaacactgttgcacctgtcaagaagggaattaagtcctactaaaacaccggggtttgcaatgactgtcggttcctgaatttcgaccaaatagccgtgacgtattgcttccacaagaggggtgtccacatatttgaacttctgatgggaagattggttcttataattctcatgcatctcatcaatgattgtgtcgatgagctgtttgtataccacatcctcagttacttcttcatcataaatgccggtcagcttctgataagcggttgccgggtctagcatgatatcctggaaagatggatattcattctgaagactggataattttccatccacatctggaagaatctgaccgagcagatcaaatatctctgtattggcagagcaggtaatgcaccggtagggcagatgtaagccagcagcaatcgccttggcaccttctgtttttccggttcctgcagcaccccgcagaagaaaattccgcatgggagaaactgtatccgttgtcttttttgcatgttcacagatccgcttgatctccggcggtataatataccatggttccagcgttggaacagtaagttcttcctggggagtgagtatccgagattcggataagacgtatttgtttacaaagtcttctttggcaatggcctccctgttcctttttgtggtagcaccgggaatcaatatttgaaaagtaccaaagaacgtatttgtaggagcataagtaccctgctgtactgcgaatggtttgagctttggaatagcaccattggcaggagtatcattgggaatcccgccggtagaaagagaagttccgtatcgcaatctgcgatagatattatcacaaaggacggctgcagttttcacggcttcttccatatccgtataaccattgtcacggtgctttttcaactcctgataatattcgttaaactcatcatcctgcagaatggtagggagaagcgcaaacaaaagtgcagctccactgttcttatcttccttcaaaagatattggtcggatattgtttctgcatctattggtttaggataaataccggcaatgaattttccgtttgcccggttatagataactacatgaagatctccagttttgctgggatattctgctattgtataattattcccctggctgccaattgccccgagttcttcagaagcggttccactgggcggattttccagttccatgtatgcaagaatcgcccggagcgtggacgcatgaagtgtcgaacgtttctgaggctgtgtgcagtatttggaatagacatccttcctgatgggatcatccgtataatcttcaaaaggttccggaagctttcgcttgaaagaccagttactgatcaggtttccatttggcatagtatttctcctccttttttacatccaggataattccagggtgccttcgttttcttttgcattcagctcatcacggataaaaatatctgtgagagctgcccagtagttttggggcggaaaatgctcgaaagtacctttgatttccttggaatctccatttttgatatatatttctccattttcgctgataaataatttttgatgtcctcttgcctgcagatctccaatcagattggagagtaatggcttgccaattagggtataccaggactggggatccacctgaccgatggaatcagtgcctgctggttccgactttggctttaatgattctatcgtcatcatagaaagtaccagttctccataccggtccagtcggacttcagcaaaatgatattctttcgtatggaaggtacgaatacgcagggcatttccattcagaagactgtctacatttggttctttggtaaattcccatgtggcatccggataagcggacttcagtttccctgtaatctggtaactgatctgtctccagagcagagtttccatatcggtgataccgtctggattcccagaggaatatgctgactttcgtttgagtgccggagatgggatgcggggaagacgcgggacaatcaggaagaggagacttcctaaaatacctgcaagtgcaatgaccgcaatcactgagcggtttatattatccggtacaaacagtaatgacagaaacaaaacgagaacaacagattttaatatttttaaacttttactttttttccttcgtactttcattgtatgattcctttcctgtaaacaaaaaaagaggaaccgccatgcccgatgggtaagcaattcctcaacctgttatttcttttgagttatccgttaaacggaagctggtcagccatgccttccgggattccctgaaaaccgtccccggtaaagctaccttgctgtccatatgccatgttctgctgtggataatagctctgctggtacatgttgtttccaatcggtccagaaggtggagctgcataagagttgccctgtgttctggcacttgcggtgttaggtatacctgcattttgatttccagcaccattcatgtagccgtttccctgagcagcgcgattttgataactgccacttcctggggtagccgcacctccgttgttgttattaggcatgctattgccattttgatgatttccagaatttccgttattctcattttccggcttgttggaaaggcaaaactgccagtccttgacattaattttggctccaactcctggctgcccagccttctgtccctgctgatagagaaatggatggatttccagatctccatagacatagatacaggttccggattttacaccggctttgatcagacgctctgccaggaacttgttaaaatagcattgatagaacatggactcgtatccattctgaccattttgtgtgttctggctcctctgagaggaagcaagatccagactgatatactcagatccgttgttctttccttgctgcatggagggatcctttgttacccttcccataacatgaataattgctgacataaaaattctcctttctgcctctttgggctttaaaataataaaaatgaataaaagaatagaaaacctgtatcccagatttcccataaataaaaaaagagccattaagtgaccgcataatacggctatcctaatgactctaatttccaacataaacttacgtgtgctctggaagaatgatccagactccctgtaggggataacacaaaaactcaagtacagtattatagtaacacaagataaggcgtgcgtcaatgaacaaaacacaatatataggaatcagagaggttttgttccagttggaaaatataggatgggatgatataatttagtcataaaggataagaatgtgttatttttgggtattggaggagctttgatgaattcaataaaaatagaaatgggagctgttctggcattgaaaaatgtcatacagttaaatgatttgatgaaagaatatattaacgacaatgataaagaaccttcgtgggatggatttatctatttatataagtcagatgatatgaaggctgaaaatatcaaatatagaattcctgtacaggtaaaagggaaaaatcaagaggatctgcttaaaaagcaaagaataagctatccagtggagtataaacacttaagaaattattataaagatggcggtgtattctatgttgtagttgcgatttcgaatgatagaagaaagactactattttctataatgcattaactacggtaaaattaaatgctttgcttaagaatagagaaaataagaaaccagatcagactaaaaatgttgtattagaaagattaaaaaatgatgatgacaaattattgtttaaagtgctttcgcaatttggatttgatagaggacaacaaggaagtggagagggagaaattattgaaaaagtaattaatatagatgtcattaataaagtagattctatccgtgttacatcttatttgactacaaatgaggatgaaacaataaaaatggtttcttcgggagaattgtgtttatatggtcatcggtccgatatagatatgtggttgccatttgatcttgaacagcaaaaagagatacaattgaaaagggtcatacagatggataagtcaattgggatcgatagagagatatattattgtaattatttagtagaacgtgaaaatttgaaagatcctataatccgagtaagtgaaaatttgacaatcgacttattaggagggaaattaagacttgagatgcatggaaatatagaatctttaatgaaagatgttcattttttgtatgctatatccagaggtaatactttttgggtggacaataaacaggtgacagaatacaaagatgtgaatcttccttcaagtttacaaaaaaatatggaaatgataacagatttttataatgctttaaaagagatacaattttcgtgtgataagagaacggatgaatttgatgaaaaggattggaaatctgttgtaaaattaattaatgtataccatcgtaaaatcaaactgaaagaagacgataagagtgagtggtataattggtggtgggatgaaaaagtgataccgcttcttattgtaaaagatgaaaatggcaaaattcagattgtcaactggattggaaaagaagggtatgctgtatttactgaaagagaaacaggtgaacagagtagacttccaaaaggaatgctctttaaaagagatatatgggaaaagctatatgatgtagatgaggagattcttttaaaagatattgaaaaaagtgattactcagagagaacctcaaatgacttatatttattttttgttgaaatactggcagcgtacgacataacaaaaaatgagaaatattatgatatggcacaattgcttattatgaaattgttagaagttaatgaaaataatgaatatggtattattaataaactgcagttattaaagagaaaaagagagttgtctgaagatgaaatagctgtgttggaagaattagaggaaaagacgaaagatgatatggtgaaatgtgctgttaatatattgcttgaaaacaagcataatgcgagaaagttgataaatcagttatcagaggaagaccaagccacatttaaacaatttccaatatacaatttgttatgagggataaataatgcaaactaaacaggaagcgattacatattgtctttcttttgagcaggtatacgaggattatccattccacgattctaactggtgtgtgatgcgccataaagggtctaagaagacatttgctctaatctataacaaagatggacatgtatggattaatgtgaaatgcgatccgcagtggagggacttctggcgaagtacttttgcatcggttgttccagcataccacatgaataagacacactggaattctatcattctggatggaactgtcccggaggaagatatcaaacggatgattggtgaaagctatgatttaacaaaggggaagaaagcatgaggattttggtagatgcagatgcctgtccggtggtatctattgtagagcatattgcaaaaaaatatcagatatcagtaatcttactgtgtgacacgaatcatattctgcagtctgattacagcgaagttttgatagttggagcaggagctgattcggtagacttcaagttggtcagcatttgccagaaaggtgatattgtggtaacacaggattatggtgttgctgcgatgattcttggaaagggagcatacgggatacatcagagtggcagatggtatacgaatgacaatatcgaccagatgcttatggagaggcacttagcaaagaaagctcgaaatgcgaaaaaaagaaaccatataaaaggtccagcgaaacgtaccgctgaagatgatgtacggtttgcagaatcgctggaaaggctgattcataaatatctcgaggtgtaggtcaggatgaaagaatacattatgagatatgagtgttaccatgttaactggtaatgtaaaagatgccgtagacaggaaaaacccttgctacggcatttctttgcgttgataagtacatgagaacgggattaatcttttgagggagaaaccgaggatagctcctcgaatccgagcaaattatcattgatccccatactttgttcctcattataaggagatttgcggaaatacattcggtaatagtgcccttgaagcagttttacacttttatctgttgtgaactgatattcccggtcatcgtttccgataagatgtatttgctgtgttttcttaaaggctgaaacttcccgtttgctgcagtatccttccactgtcaggtaggaaccggaatggatgagatgatgcaggctgatgcatcgaatcaggcagcatgcaccgattacgaggctcataatgagaaggatcttatcttttgtctgcagcccgatgatgcatccgaatagtacacaaaaaaagccgattgccgcctgggcaaccagcttggataataatggttttggcataatactcctttcaaaatcgttggaatgaaatttgtttattaagatacagattgcccacagcctgcaggacaggatactggatatgcagaatctgtgcctggtcagccagtgtcaggtaggtatcatccgttccatcatagagttgtgtgaggacatcctcttcccgctttggtactttcttttgatctacacaggtcaccagttctgcagtggttagtggaacggctttcgtaagctttaagacggtttcctcaataggcgtgtttttttctttccgcagatattttccaaaatctccgggcttgattttcccttctacatagagctggatacaggtaaatagccgggtagagaaagtttcgtgaaccggaaggatgtgaagttttcctaaaagctgatagagtgcatctatgccggtcactccttctccttttgcaatcaggccgcgtaaaagcagccggttcagatagtgagaaaatgccagtccgtccggtctgccgctgtttttaagccgcacactgtaagcagactccagttcgtgtatctgcagaatctggaaggcaaggcagctccagagaatcagttcgtgatcgcatagtccgaattcctgatgattattaagaaccataggagtggattttccatttgtatttttgacaaattttaatgtgccgatggcggtataaagtgtcagcatagaactgcctccttcttgttatgatgctaatagctcatataatatctcattttctttcagccattttctcgccttgctctgccatgcccttaccctgttggaaggaacctgatatagtgttgcaagctcccgatcggtgtaaccgtcttgctgcagacggagagtggcaattcctttttgtatcatattgctgcctgccgatgccagttccttcaggtatgcagtggacaggttttgaatcgcttcctgctccgtggaaagggaagtatgattgtggtgaaactcactttcataagagtgaccgtctgtttattgtaaaatagaattaccgaaagttgcaaacgggaattggagaatgttgcatctccaaattggagaaagttgcaaggcattcgctagaagcgctcaggaacggtgtagcgcttgagtggcagccaccaagtatgagcattcccatgaaaagatccattgcaggtatatccaaaaaccattaaccttatctttattgtagtccaaacaataaagacaaggaggaaaggagaatgtcaactacaatggatcagatacatcatatcagagatatgttctaccggcaagataagaacatttctgaaatcgcatctgagaccggccttaactggaaaacggtcaaaaaatatgtggatatggaggactttaacaatccatctcccaaacctgcatcatcagaggttcacgaatccaagcttgacccattcaaacctttgattgatgaatggctgcaggcagacaagcttgcaccaagaaagcaacggcatacagccaaaagagtatttaaacgcctcaaggatgaagcagatggtttcggctgcagttatcggcttgttgccttatacgtcaaacagaagaaagaggaactacggctaaaaagaaccgatggctatatccctcttaatcatcatcccggcgaagcccagtcagactttggaacagccgatttttatgaaaatgacaggcttcatcacgaggctaagtaccttgtgctcagttttccctacagtaacggaggtttcctccagcttaattatggcgaaaacatggaatgtcttctggaaggactggttgccatatttgagcacatcggtggtgttcccacggaaatctggtttgacaataccagaaccattgttaccgaaatcatcaaaggtggcgggcgtaatgtaacagagcggtttcaacgcttttgtgaacactaccgcattaagccggtttttatgaatcctgaatccggatgggaaaaaggaaacgtggaaaacaaggttggctacctgcgccgcaacgaacttgtaccggtaccccgctttgatgatcttgtgaaagaaaacaagcatcttctggatcgttgtgaaatcgatatgcagcgtgagcactatgatgacgatgatgaccgctttatcagtaaactgtttgaagaagataaggctcgtttactgccgcttccttccgttccgtttgatacggcactttacacaacggcaacaacggataaatatggaaagtttactcttgacgcaggaaagcaccgttattctgcttcaccggctttctgtgagtccattgtaaatctcaagattacatcctctgatgtgattgtcatggacaaagatatgcacgaagtggtgcgtcataagcgcctttacggcaatgaacatgaaagaatggactggctgccataccttacatatatcgccaggaaaccccgttctcttcgaaacagcggcatatatgacatgatgccacaaaccatgcagatatacatggataactgcgaaagcaaggaacgcggacgtgtcctgaaggtgcttgcagaacttacggaaagaaccgggtttgctagtgctgtcagaacagttgacgaagcagtccggctgaatgccacagatccggacagtctgcagagcctttacaggcgaacctatgcagatgtaccgcttctgcctccgcttgaaaacaaagttttactgccacagcagaaggtcattccgttcagaaatgatctgaaaatgctggatgccgcccttaagaagggaggtgtctcaaatggctgatatagaaaaatccattgcagcatgctgcaaacagctcaagctgtccacgaactttgcagggcaggctttcgagcagaaaggagacacaccgcaggaataccttttaaacctcctgacaaacgaaattgaataccgtacagcaaaaaggaagagcaagttcctcaataccgccggcttcccacgtagataccgcgtggaggaattcagggcagatgagatagatttcccggaagacgtcagcttccaaagcctgttagacctggagttttatcatacaggaaaaaatgtcatcatgtatggaggaacaggaaccggtaaaacaatgctttccattctgattggaatgtctgcatgtaatcaggaaattccggtaagattctaccgcactgccggacttatcaatctcttttccgagagtcagagcagcggaaagcttactgcactgaaaaagaagcttaacagtgcccggatactgattctggatgaattcggatatgttccgtatgaccgcaccggttcacagcttctgtttgattatctttctgagatacacgagcagaaatcggtgattttaaacacgaatcttgaattctcacagtgggtgaacgttctttatgaccaacggatgacaacagcactgattggcaggctcacccaccatgtggaactgattctgttcccggggatcaataatcggttacgtgaatcaagcatcaatgcaactctttcaagaatcagcagtcaggaggcaggtaacaatggctaaaaataaaaaagttatcaaagaacagaaaaaatatcaaaaccttcaggaacgctatgaggagatgaatgattatcttcttgatctcatagaagatcaccgatgcgcagaagaagatctgagatatctaaatgattttatccattataaagagctggatgaggagttccgctatttcagggaacatgcacatgaagatgaaaactcggaacttccgtttccatatctcacgctataacaactaaatatggtctgcaatggctatgtagctggcagaatagctgccagccgaggccttgcaactttctccaatttggagatgcaacattctccaaaaatattttgcatttttctccaaaaagtgcttgcaaaaaacatgaccgtcctcggattccagcaatgcatctaaggaacagaatcgtttattatattggtaaacggtacgccagtatccgtagatcgcattacggacagcagctctggcatatggtcggaagggacggtgtccatcgtatttagaagctgcattgcacagtgccaggtaactggtttgtgtcagctcctcatattcttcttgggaaagattcgagtaattccgtgtcaggacatttaccatttgtggcaccagatccatattttcttcaacgagctggctgtagcggataggattatttttcatgtcatccaccctccttaccctgcaaggcacagtggtacatggttgtagcgaaggactttctctgattcttctataagtcgttcgcacatgtactcactgaaattgccgatatgtgcctgtgtggtgtcgaggcagaatttgtctgacatccaccggtaggcatcttttttggacagaattccctgtttccatatctggtcaaagatccggtgtgcacggatccgtttctcacgaagagatttattcgccagagtgcctttagggcgagtggtgccggaatggacgctgacgtaggaattgcagaccggatagcggctgcatacatagagtttgccttcccatgcattttttccatggacataagatgtatctcttaaaatggccgggctgccacagtaagggcagcgtatgatttgtttcttcatcatgattcacctcgcattacgttttttatacgtacatttattctttattagcatgtttgttacgttttttatacgtatattgtaagtaaaagtgtgatgaattcccatatgtcagggatggaaacaggtacccaaatgttccctttttaccacaatctgccattttttatggatgttatggatagaaaatggttttaatcaatggaaaaagaccactgtctgtaaaacgttggtagttgactgtcgtgaagataaacttaccacaaaagtatcggagcaggaaaagtacaaccagaattaagcagattcggtagatggtaagcgcctgctttttctttttgtgtaaagaagtaaatctgcagtacaggatataaaccatagggataaaaatcagggtagtaaagcctttgtcaatcgtttggatgatcagtgtaagcatgttgtacacctccttgtctttattcattctgtacgcagaaacgaacgaaaacgcaacttaccagtcatagtttttctcttcctgcatttttagaagttccatacagggacagtcggacttggttgcagttctgatatttaggtaagagcgatataaggataaaaaggcagatacagatatgttgcttatacattcttccggttccggataacaggaaaataaaatccgggcatcggaaagagggaggatcagcggttctgctgtggcatccggatgaaataggaatccggattctctgcatataccggaagttttacaggaagggcaggtcacatggatgcagtgatgccagttcccatcacaggcatctaagaatctacgaacatgtttgatatctgtctggatataggttgtttccatattcatcaccaaaaagcaggcagtctctatggaccgcctgcactgaaattaaagattatttttgtttctttttccggaaatagattactgtagcaatacctgcaagcagaagggcacctgcagcaatacctgcgtaaagaagaataggggtattatcgccggtcttgactggtgtggagatatccggagtatcttttggtacatcggtaattttcactgtctggccgtcatcattcaaatcttcgtgattggtcagttccacttcttttttgttgtctttatcaccggtagatacatagagcttttcaaaaacaactacatcgtgtccggaaagggcagtggcatcaaaggtaaaggttacttctacagtgccttcagatttgtctgccttaaaagtagtttccgcagtcactggctttccatcaataataacttcttttccggtttccttgtccatcaaagtacctacgacccggtaggtaaggccagttaccagatccttgtaagaaacggtatcaataatagaggtttctttttctgcaaggacttccttgtcgccgtctttttcatctttagcggtagtcttaatctccgggaaatagatggtctgtggagcatcatcaatttgggtatggaaagcaacttctttgtcctgataagatacagactcaaaggctactatcgttttgcctgcgagagcagtggcatccagtgtgaaagaaagctctacagtgccttccgcatcttctggtgtgaaggtcagttcggacgtaacttcttttccatcgatttgcagagacttaccagattccttatccatcaaagttccggttaacttatactctttatttggaatgagatggtaggaaacggtatccgtaatggtcagttctttctttggaactgccatctgggtattggtatccgggcagtttgcctgagttgcaatttccgggaaaaagatctgctggtcttcatcttcgagatctgcatgaacagcaatttcttttttatcctgtgttacagattcaaaaacaacggttgtcttaccggccagtgaactgccgtcaaattcgaagactacatctacggtacctgagctagtttccggcgtgaatgttgtttttgcagttacccgtttgtcattaattagaataggttctccagttttcgcatccatgagtgtacccgttgcagtataattaaggtttggaaccagccctttatactggatcgtgtcaatgagtttcacttcctcatcagcatttgccatatgctcaccggtttcagagtctatggcctgcgtgccgatctccgggaaagaaatctgctggtcttgatcagaaaggtccgcatggacagccagctgtttatcttcctgatacagttcctcgaatacaacagttgtttttccagaaagtgaggaagcatcaaaggtaaaagaaacttctacggtaccggaggattttttcgctgtgaatgtcttttcagaagttacaggtttgccgtcaatctgaattgcttcaccggtttcggcgtccattagtgttccaaccagcttataggactgacctttctttagtccggaatattcgacagtatctacaagagtgacttctttttccggtttgctcatatgggtacctgtctctttatccagagctgttgtgccgatttcaatcaggtcatcggtcagggttccaaggtcaatggtaacggaatctttatatacagtcacttcgaattttaaaagattcatgcctttattggattcacatctctgctcctcaatgacatattgatcatagataagggcacctttggaatcatccggcgtggaagatccgaaccagaccccatcttccgatgtttctccacggttggtgttctgggtgtgtttgttccatttggaagctgtactggcatacccatttttgtccgtcacgatggtatggctttctccggttgtaacagaggtgatggtaaacggaacatcagaaagacgtttttgttctccatcggatacctttaccagttccagatcgccacgcatcacctgatttaaaatagaggaatcttcggcagtcatctctacgatttctccgtctttagtaatgtcaaattcaatggaaatcgttccctcgttcagatatcctttcggagattttgtttcatctacacggtaatgtccgaatggaagtgcatcttttgcagtagatgcaagcccgttttcatccgtcacaagattcatgacaacctgatctttcgtatagttcttgtcctctacaataacgggatgctcatttaaagtggtaatggtaaattctgcaccttccaaagtagcactgccctgtggttctgctttctttgtctcctggtcacgtttctggatcttaacaccgccacggtagatctgttcatcgacagatgcagcattgtagcactgtacggtttccttggcaccatcggctgtgatcttctgtacgaatacagtatcattggaaaaatatccgacaggagcttttgtttcctgaacagtcactgttccgagcgggagacaaatggtttttccatccgtctgtgtatagaacgcatctccagataccagataatctttggaaaaatgagattttccttctgcatcagtcttaaatatccaggtacgtgccggtttggctccatttgcggcaggatcctgatcggactgttcggtatagaatttaacagtaaactgtgcatccgcaagagatgcagatccttgtggctgtgcttcctgtgattccttgtccagtttctgaaggagcagatccattggattgctctgtgggatttccgtcacatttacaggcgtggttgcttcggatttgacagtgacgttatgggctttggtatccaggatgaatcctttggaagctttggtttcttttaccacgtagtcgccttcctccagttctccggattttgcatagccgcttttatctgttgtcaatgtctgtaccagtttgtctcctttgtagatgccatattcggcaccctgtaagctatagttactgttcccatcggaaacagaggcgttggctgaagatttacggatttccagataaccgtagggaacctgataccagcttccaacaacagtctggcttccgcttccgggaatgataaatgctcggaagttttccgggggagcaggaaggcttttgattgcttcagtaacttctttcgctttgtcaatgaaattctggggtgcgccatggaaggctccggtatcagaagaataccctgcataaatataggcgacgacaagatgcccgattacataggaattgtcatcagaccagacgctgaaatatttgtcttttacagttttttcatagccataaccgccatttaggtaatacagtgctttccgaagcggggaatcctttgccagaaggtcataggaataactgccggaagcaggggttttcttgagtggttccacacagtaagcggtattgttcccatcaaatgtcatgcgtgaagtaaaataatctccatacggaatgttcgctcctgcgtgaaaactgacggtaccgtttgccgcatgaacagtcatgccgccggaaaatacggtcccgacagtaaccagtactgcaagcaaaaatgcgagcagccggtggatggattgatttgttctttctaacataagtctcctccttactttgaagatatgaaaaaggcagcgatttcgctgccccaggtgttaaccggcttttgcttctttgtgtttctggcgttcaatgatttccagaagttcctgccggtcggtggtaatcagttccttttccagcgtggatgctttgaattccaccgtaatgttattgttgtttgttgagatcaggccattccccctttgaaaatgtgtgatattcatgacttcggtttcagacaggtgcaggatattttttacccgctgtgcctcttcgtcttccatgttcaggatgatcttggtcttacagttgttgatgataccttttccatatttaccatcatccagagcaaagaaatcatttaaatcttgtgtggcaaaaatgccggctcctgagtaggcacggatgattttggcaatctccaaaacaaattctgcagccaggcggttactggaagcaccgatgagctgccatacttcatctacgaagatcgctttttcctctgtccggttttctttcgctttatcccagacgtaatccagggcaacgaacataccgaccgtcagaaggtcagaggaacctgtcagttccgaaatgtcgagtactgtatatttgttcgtcaggtctacgttagttttctggttgaaagaagaagcagagccatggaccagacggttcaggatatgtgccagacgtttggtatccggactttccatcaggatattatagacatcctcaaggatcggcatttccttatactggtttggatgatccgggtcaatgagggattcatttttatgtgtaatcccttttctggcataggttttaatgagtgcctcatccagaagctgtttctcctcatgattcatgtcaggaatcaggagagagaagaagatatggagcctctggattttggaagccagagcggaagcatccagtgttggtccatccagcagttcattgacagaattatcaactttgcggatttccatgacgttaatacaattttggctggcaggagagatctggataaattctccacctacgtttttacaggcccggtaaaattcatgccccttcaaaggagcaatgatgaagacctggattcctttccgccgcatccgaagtgccatagtctgcatggtgaaggttttgccagcaccagaacatcccagaatacagatgttggaatttttatactgtttggaatcaaaaatatctgcgatgaccagtgaattgttatgcttattaactccgaataagatgccattgtcgtcacagatggagtagctggtgaacgggtagcagcttgcagctcccgtagtcaggacatttcgttttgacagttcatagagttttttatccaggtttgcaagcggcagggaggataggaaaccctgctcctgtaagaagtagcaggagtgcagatccatatcctgggaaatcaatagtttcttcatttcctgaatacgccactgcagttcctcaagattcgaagcagtaatcgtgatcaggagattgatatagtaaaagtcttcgttatttgccagaccagctttcaggaaatatccggatcgtattgcagaatccagatcatcaaagtctgcgtttgtatcggaagcatccttgatctttgaccggttgatacggatctgttgtccaagccgctgctggatcttatcctttggctgcttatgcagataaaaatcaatatctatgccttccccggcgttgatcagtaaggacagccagccgggtgcgactttctgtttatagccgtcgcttggaaccaacaggtacgcatgataaattccgttgatccgtacataactggagtgccggaaatctacggactccggtgcaatgaactcgttgatccggatatgatccagttcttcctggcgaccttccttcatatagcgtgcaagtacatctgcgattctatcctgcagaggcttttctgtacaaagggtgcggtttaataatgtgtataggacatcggttgtaaattcatcttcattatcatgggtaaccacctgatttccgcattgatataaaaatgtcttagccgtctgggcggctgtctccagtgcagcaaggatttctttttcttccactttccggtttacattgaatggttcatactcaaaaatcagaaagaaccgtcttgaaacggcctctctggaacttaatttctttacgaactggatgtaatccttctgcagttcccgacagtgcggattggtctcacgggacagttccagtgctgcctgttccagatgtttattgatatctgcctttttggagatcatcttaatctgcaatttgactgggctgatttttaagtaggagataaagctgtaaatgatgccctgctgttcccttgcgcttcgcaaaaggaagttgataggttcaatctccagaatctttacatatcggtggtcagtggtatagatgatcccgttggcaattttttctatcggaagatagtcttccagtgtcatgtcctttcgctttttctttttcgaggaaacggaaggtgaaggagcaggctgcttcttattggagcgtgcctttttcgcagctttctccaaacgtattgcctccttttgcgcaagtttatcctgatgcagtttttctttatgccgttgtttttcggtttttaaacgctgtttcttttcacgtttcgcaaccttgagagctttcgcctgttcctttttcctttgtttcttttcaaatttcagaatccggatatcttccctggcctgcttcttgatgccgcgttttgtagatatatcatagagccgacgctctttttttttagaggctggtgtgggagaaacttttgaatcgggtagaatctcttcctctgaagaagatggcatattacagggaacctcctcatcatgtgtagctatctccattggttgaggtgatggcttctcttttttctcccggttctttttcgtctttggttctttttgacgaggatttttacgctgttttccttttggctccggtttggtatccagccggtataggattctacggttaaacaaaaaacggacagcattcatcagaaaagccgtcagactttcccctccgatgccgatcagggcgaccatggctgctggaagagatgtcatacataaaatgatgatccgtatggtcagggacaggggaagatgcacaacaggtattgcaatcccgatggcaagaatggctccttcgatagcatttcggatcttgaacattcctcccatgaatgtaccccgctcaataaaattacgggggattaaggcaatttgttgttcttcaggattgttcacggctgcacctcctttgcattagttttcttttccggttctgttgcttcgatatcgtttggggtatcagcaaaaccgccttcctgcagggattctatttcttctgtagtaacagctggaagtttttgatccgtcttacgttcataggtaattatgttttcactgacttgcagtttttcttccccaaataaaaaagcaccggtactggtgctgcaggtaactggaagggtagtattatcagagaaagcaaaagtaagcatgatgtcgtttccttccggataggtggtctgttctggaagaaaggtcacagaggtaatgtctgttttcccagtttctttgagatacagagaaaattgttgctttagttcattgatctgtgtgtctgctaaaaatgcctgtaattcttcaaaggcaacgtatttcaatgtgggaagtgagacagtatccgctccttctgtttggatttcttttgcgggctgttttgggtcagccgtatggtttttctgtttttctgctttccataaggcaggcagtacaatgcctgctacgatcatgccgatcatcagcaggatggaaagaatcaatttttttctgctcataagctctcctttatttcttgtcaaagatccaatatgcacttgctgttgcatgaatttctgacatcatatcaaattcccggttgatatagtttttggatgcactgtcattcggatcgttaaccagtacctttccggaagccgttacaccacgaaggacaatgaaatgtccgcctctggtaaataagcctgcactttgggaactgatgacaggatggccttctgacaatgcttttaggactctatggggatcgttggtctgggtgaccgatccgcatccaaaatgactggctgccgctgcaaagtaggaccagtaagtgccgacacccggtttgtagtaagaatttccgcaccaggaaactgcatctaccggagtgatggttttgcccgtcagataacttgcgaccatggcgaagctggtcgggccacatccgctggttgcaatggaacctccgccatatggaatatttccgtaatctgtctgcaggtaatgaggtatctgcatcccatttgccggataggtgccgcctgtagaagaaatgatgtagtaccggagtacatggtctacgtattctttatcgccatatctggagtaaggccagttagggcgggcgcacatcatatcagaataagcgatggcgtttgctttggtataaccaccgtcccgttccatggcccagtcaatataaccggaaccgtaattgtatccctgcaaagcaagcttgatccggtcaagatctgttggtccggtgcatccagctttgtccagggcatatttgagttcctgaattccgcattcgatgctgtattccggatctgtaataccgttaggcacatggggatatttcttattaaatccaccttctgcggcctgcatgacatcaagaccacgtcctccggattcctgcatcatcacggcaaggatcagttccacaaagggagtcattccgtattttgcagcaatttgttctacggttgcccggtagcgaagcacctcatcggatacattagcggttgcaactccggaagcagaggaaccaaaaaagagggtcagattttctgcataagcgtctgccacttttttctgtttgtcgttcagatgaaagacatggtctgcaaaataagaatcaccggcatagttgattacaaagttatgccgggtaaaggtaaccgtctgagtctgtgaatccgttccttcaccggcttcccctcctgcaccggcatccaccgtaacttccatggtaactgtctctgttgatacgtcataagtaaaaagtccatccttattcgcccggatgacccgcttcagttccgtaacgttgatatcccgatagttgtctttacttgcacagaactgggcaatgagctgattggcatttacagagatatagtaagcatagggatccgtaatggatacggcatcactttccggtacacgagaagccgcggcattcacatcagcaagtacctcgtcgtgacattcctgtaagacttctacaatggcttcattggcagcacgtatattttcattgatcctgctgttactggtaagtgctccggtattttcggagagatttccgaagacaagtcccggaagcatgactatgaataatactggaattaaaagtagagaaacaattccagccaccgccttttttaaggtttcccgattctggattgcagcaccaataacggctccaaagggaccggctgtggcaccttttatagcacctgaaatagaagccatagctctgcctacctgaactgcttcattcagaccggtctggtgatctgccaattaaattcgatcctttcttggaggtgtcgggggcagtttttggtcgatggattcatggtaggcaacttttccaccgcctgcatcataagggtttttagttacggcatcctgtgcatactgcttgtaccatgtagcaccgtctacagactgcacagtttcatatgtaccctgtgagggagccatatattggtctgcatgatagagagcaaactctctggaaccggattcggtagattccgttccggtgatccgtccgcctcctatttccatattggaataattgggcaaagggtgttcggaatctgctttcattcccatataagaaatataagccttttctgcatctgctcctttgatggaaccgacctgattgtagttaccctgtgcaatgcggctgatcacattgttggcaaagtctccacctttatttaaggaagaatgatacatgacactgccgatgctggaatgttctgtgtagccagttgccgtattgactgcgctacgttccacctgccttccgacagctccggctagtccacctgacaggaagcttccgccgacagctgcggaacctggagaagcggatgcccggtatccgccgccaccgccacgtaaatgcatggaacttgccaggcttcttccggcaattaaaagctctgccatcatatttccgccagtgtttcctacattgatgccaaggcttgccatgaaggaatcgatcttttggctgacttttaaaaatgcgatggcgcagagaaaccagatgaatatattaccggtaactgcttcctttccctggtttgccactgcctgttccacttctgcctctgtaagttctgccgcgaagacggggaaggaacagaataagaccatgcaggcagtaagtgtcagcaataatataatttttttcttatgtttcatgtgttcctcctgaaaaagtaaggttaacattgggacgataaatggggattcgttgcttaatggattgcattacaggatattgctgctttttcagaccataaactgtagacgctgccattatctttaactgcacgaactgccacggttgcagattcccagttcgttcctactttctgttttaagcagcctgttacaaactcgtctgaagcttgatttacagtcagccaattattctctgtagtgtatatgtgttccgttccatctgcttttgtaatcttaatctcgtatgatgttgcaccatctacagcatcccactggatatttaatctgctttttgaatagaacacattgctgtgtatatatgtagctctggtgattgtcggggtattcagaagcttaatatctaagtctttcacagcatcttctactgcgttagatatacctgtttggtagctgtcaggaagcttcacagtaatctttggaacaccggtatatccgtattctgataacggtttatattgtggtgttgctgcatgtgccgtaagggttgaaccaagcagcatggttgttgctaatgacattacgattatttttttggcttttttcatatttgaatttcctttctttgttttgtatcggtgttgaatttcaagttattgtgtatctcacattagagagataatgggttggcaaggaaggtaccgaccattgaagtaaagagccgtagacaccaagcgttcatcagcagcaggaaaaattggccaccaagcatccgacaccaactcttgaaaatattaccggttgcctgagaagagcccattgcgaaagcgactggggctgtataaacaagaacgccgagaagaatgtaacgttctgccgcttcaaacagtagtttgatgtaattccatgccagaatcagtaccaggattagtgcagtaatcgcaacagctccattggcacagacaccgaggataacagtgataacggagttaaagtctgcgaattttagcggaggcagatcttccgtcagaatccagctatatggtgttcctgcaatgtcaagtaaaagatctacgatatcttttgcatagaaagtaaggaacaggaagatcaaagagcgcatggataatttcagtggatcttctgcctcaattccggcaccagcaaagtaatttttaaataactgccagacccagttcagtaggatcagacctatggccagggccagaaatacctgatacatgctctcggctgcggggaaatatcttaaaaaggtatccatggagcaacccagagcacctaagactgaagtggtaataagatccagaatgttcatgacctgctctgcaatccattccacgattccatctaagattcccatttaggcacctcctttcctggcttagccattccatttacctccggcaaagaacggtgtgatgtaagccatgatgaagccaagaccgtttaagattgcccaggtgatgacgatacgtttgagccatgcacgggattcgtccacggtttttcccgatttggaaaagttcatcattaaaagagccacagatgctgttacaacagcagctatggtagaaatcaggatgatctggttgtagacatctttcatgatttcatttgctttgtcccacatgttagctgccaaggctggctgaatattgcatgccagaagcgtgagcagcagggatgctgtgtaaataatccgcatgtagtcaggacgacgctttccattcggcgggttttctttgactgtatgttttctcacgtaagttaaacctccttcatataaaaagggcagtatggaatatccaccctgccccgatgcttatagtttcttagtgcctcatgccagtttatccggcagcaaaaaagcagcccggtcaatacaggctacctgatgcaaatacagtataaaattgtaaatccaattcacctcctgcaagaaaaaacgcagccagtaccaaaagggagaggcaatgactccgataccgctgcgcaattcttgcatataattttgacaataccaattttagcatgtgtatatttacctgtaaatcgcagaaccgtgccagtttaggactatttatgtgccattttaatgaatgccaaattgaatagatagaagaatctgtataaaagtggtaaaataatattagtggaagtagtacttgagaggaaagtgaattatgaggtatatgacttggtatgagcaagaggaatgtcttcatacagcagatggaagagaaattacagtcttaaggttagatacagaggacaatgacgagattttagatgaatgggcagaacattttagaaataattatcgaaccttagaagatttagattttgatatagaaggtacaggaaaaacgagagaagaatttttgattaatgatgttttcccagatactaaagtgcaaccgggacctgcaacaagagtaggagatttttgtgaattattagtagctgactatatagagtttatacgtgattattatgttccgcgaaccagatattgtaggaagattaataggaatatgtcttctccaggcagcgatgtattgggatttaaattaaatgatcaatcacctcgtaaagacgaaatttttgttatagaggttaagggaacggccaacccaaaatcgaatacgaaaggatatcaaagactgcaggaagcgattaatggttctaaaaaggatattgtccgatatgcagaatccttaaatgcaataaaaagaagattaagggattctggaaagacagataaagtaaaagtggtagaaagatttcaaaattttgctgataaaccatatgtgattagatatggggcgtgtgcagtattgacaaatagtatttttattgctgatgatatggttaatgctacgacggaaaaccataaagttaagaatcttgaattaataataatacacaatgaaggcttgaaagaacttattgatgaattatataggagagcggcgaaatgttaattgaggagaaatcaaaatactatttaaagaaaatacgtgcaaaagccaaaatgtatgaatatcatattccggattcattacatagtgatacagagaagcaggttaatcagttgattatttccgcgattgctataattggtgatttctctaatgatattatagacagtattgagggaaaagaatttgattacaaagaatatcaggaaaatttgcgtttcgcggctaagttttttgatggatatgtagattcaaagttatattcaggagatgaagattattacctcttattgggggcggtagtttattatttatgcgattataatgggagttcccatgtactggtatcgcggatagcaaatgaaatagatttggggattaatggaatagatcgtgtgttagtacaaattttggcgggaaatagcattgagagttatgaaggaaaatatccaattttaaatgatattataaataattacaatcaatttaatgcgacaggtatttttgcaaattataaatatttgaaagattttaggaaaacggtttacgaaataggtagtgatagggaactgttgtttgcagatgcacttgttgcaattgtatatttaaaaattaaaaattcctcatatgaattaatgcctaaatatacaggggttgctccagaggtttggcacgaagtgcttagaaagggaacacttgttacagaactttggcagtcacaaagagaattaggaaagaacgaggtatttcaaggaaaatcagcaacgattcaaatgccgacaagttcaggaaaaacaaagtcaattgcattgattattctttctgcctttttgagtaaacgtacaaattatgcaatagtagtagctccgtttcgtgctttgtgtagagaaattactgaagaattagaaaatgcattttcttttgatgaaaatataaaggtaaatgaactgtcagatgttttgcaaatggatattttggatattttatttggaaacaattcgaactctgaagaacagagtgtatacgttgtaactcctgaaaaactcctgtttgttttaagacagaacattgcaattttatctaatgtgggactgatgatatttgatgagggacatctatttgatgatctgaatcgtggaattgcatatgaattacttatttccacaattaaattgtatatgccaaatgatacacaaaaagtattgatttctgcggttattcctaatgctcaagaaattaatggttggttgatggatggaaatggtgtggttgttaagaataatgttatacaaacaacagagaagacagtaagcattgctgatactatatttgatcaagaaaataaaaaattatatatatatctttattttattaatccagacagaccagacgaagaagaattttatgttcccagagtaataactcagacagaaatacaaagacttggaaaagaaactaaagtgagagtatttcctgaaataaataatggaggaaataaaaataaaaatgacgttgctattgcattggcaattaatctttgcatcaatggcggaactactatattctgcggaaaaaagcagacagcagataaaatattagaacgagtattagatattgaaacacggggatatgacatatcaaatattaaaaaaaatacggataatagggaaatagaaaaaatctcgcacttaattgagaaacattttggaactgataatgtatattatttggttgcacaaaaaggtgcgtttgctcaccatggaggaattccaatgggattgaggagttctattgaatatgcaatgcaaaaaggtgcaattcaatttcttgcatgtacatctacacttgcacagggagtcaatctgccaattcgctatttaattattccaacggtctatcagagtaaggagcgtataaaagtgagagatttccaaaatcttataggccgagctggaagggcgggtatatatacagaaggaagtattatattgtcagaaacgcatgtatatagcatgcgaaaggatttttttcgacaatggaaatggcttaattataaagaattattgaattgtaatcaggcggaggcatgtacaagtgaattattagcttggttaagagttgatgacgaaatggaagaatacttggacacgataatagatatttttgaaaagcattatgtttccggagattttgtaaaagaagttgataattatttatctgatttgatagaagcaaaagaggaaacatacaataaggcaaaatttattgtaactcagatggtgaataatattgaagctatagaaagttttttactgttctatttaattgaggatacttatgatgattcaaaagatacaattcatgatattaaagggaaacattggcttattatttggctactgatgatgaaaggaaacgtttgcttcatttagtagatttaattggttcatttattgtaaaaacagttgccacgccagataagcggaatagatatagtaaatcacttttaggagttcgaaaagagatagaaattgagcagtggattgaggaacatatttttgatattgcatgttgtgaaaatgaagaggagcttttaaaagttctttttccattattaattacgtcagattacccattgattcatgcttgtaataaaccggacgaattggtaaatgttgggataaaatggattttgggagagaattatgtggatatattgcaatacgcaatcgaaaataatattaggattttgcaaaggcacaggtatagtttgatttcattaaagcaagtaatcgatttgtgcgataattatttcggatataactgtacacttatgatggctgcaataattgagaatgtaaattatcatttggatgatactgacctaaatagcaatttaaaattattatcaaagcgtatgcgatatggattgaaaaatcaatgtagtattacattgtatgaaatgggctttaatgatcgtattattgctaagaatcttgcggaaattatagaaaaagaatatagagccggaagcagaaaagaaataatacgattgattaagagaactgttgatattcagtatgatgttttgtcgtatttatctgaatatccatcatatttcgaggaaaaagcaattaaactaatattcggctaaaaatacaatgagtatgtatgatgttctataaaaggataggtgataataatgcttgttttcagaaatttgagaaaatatgtatctggataaggatccggataaagtcaaaaagggggacttgatttctctcatcccccagtgtataatctacttaagaaaggtaatcagatgcaagatctgatgccctcagtaaaatttaatttatttctatgttaagacatagcatccatcaaactttcctagggttatcgtggatgctatttcttattatgtcggttatctatgtaggtcaaagccgcaaaaactactaatagtaaagtaagaacttccattgtgttcatgggcatcaccctctttctaaaaactagagggcttatcgaaattgcatccgcattcttccttgttcaattatacttgctaagtataacacagtcagataccagtgacaataaggttaaaattttgtataccctaaatgttgtggggcaatcatgtgctgattttataagttttgcttaatgattctggtaatgattcctactgccacattccgttcttcatctatatgcgttacgacaaaagaaacgttatctttcttcccaacggtacggctgtcatagcaggaatgggcaatggcgttgactccgatggagagccggacaaatacggtacctttgtgaatgtcttctacagtgccggcatatttgccctggactttacatttcttcatgttttccttactggtattgccttccacactttttacatctgcccggacggtgacatgttccggatcttctgtatttacttccagtatgcgtaccaggatatggtcaccgacatgaaagcgttccctggcgtcgccgagccagtcgaaagaaaggtcacgagcaaggatggatgtttccactccaaagatttcagcacgtaccactttttctgcaactgcaacgactcttgcctgcacgacacggtcttcgtgtacctttggggtaccgtttgcatctttctccagatagaaaatttgccgtttcttcagcatggcttctttacggcttgctacaatgctgcgcgtctttgcatccagtccttttacaataaaatcaatctcacagccgagcatattgttgagaatcttattctggcgtagggacagttctccataatcatgggcatcatcctgtaccagattgatcatcatttctgtgactggaatgacagtacggaaatctttgtagtaaataattgcgatcagactgccggtttccgttttttcaattccgccgagcataccagtcagaatctttctggtacggtatgcattctggatctcatgccagatcaggtctgcttttgactgggcagtttccaatacggtatcggaatcaagagttaatacagtagtgttggtaatcatttcgtttgacataaatgttctcctttcgtttatgacatgatggaatttttatctaaaggaaccatttcagacgaatctgaccaattatcttttaacagatcttctgaaaagtcatcataatctggttcctgatagacggggtcctgaatcgggaggaccggttcttttgtcttttttgatgttgtatatgtgcgccgtttctgagattttgcttgtggctttgggaggtagtcatattcttctgtcagtccattttctcgccattttggaatatgttccgatgctttctttgtgacaagctttttggcatctggatgcagggtataatcatatttttctactttcaaaactttttgcccgcgtagaatgaccagagcggtatccagtggaagacggagaatttcatccggagttaaaagtttgcgttttccaatggattgggtttttctgtattctggagaatagtcggatacccgccaagtattgagctgtttggcttcagaactaacccctaccgttacatctccggatctggcactgatgaattctgcagtgacttcatctgtacatcctaagaataattgggtatcacagttcccgatgatttcctgccattggttatatggataacggttctgcatctggggcaggttctgaaagatacaggaaatgcttagtccccttgatcggcagacgctgatctttttgttcagttccagaatagcacctgtattggcaagctcgtctgccaggatatgaaccgggaccggcaaacgcccatttttaccatgtttatctgcaaatcgtaccagcttgatgaatacgaaagtcatgaacagggatgacaggaagtcaaaggcactgtcctgatcggaagtgatgcagaaatatgcacatttttcttttcccggaagtgtcaggtcgatctcatcataagatgtgatctgtcggatcagtttattttgaaaaacctgcagcctggcacccagaccgatgatcacgccggatcttaccgtatcacttgcctgcttatagatgcagtaaggcacttttgccggatgggatacgggtaacaggtcaaaaagactatttagttccttttcggaactcaatgtcagcaatttataaacctgaccgatattcttggactctggagggaatccctgttccacgtaaagaacaagtgcttttaaaagatttaattctgcattgtcccagaaatgatcccctttggcagaaccggtattttgaatgacgacatccgaaaagacctgtgccatggtttcttgcccatctatttccatcagacagttccaggcatctgagttttctggattgaccagattgaaacaccggacagtatatccttcgttttccagatatcctgccatactttcatataattctgattttggatcggttatgatcaggctttctccacgggaaacgcattgaaaaatcatatttcttgcataagccctggatttcatggaaccactggcaccataaactgcaacatttcggttcatgcgtgtttcataaggaaggcaaaccgcttttccatttagcttgccaagaattgttcccttatttttcttcacatgatcagttagttccaggactttgtgcatctcatccggagtcatgaatccggaagttccataggtacccttggtagagtagtttagatttcgctccttatcgaaaatttcgccatttctgtcatatcccatccgcatcactaagaaggttagaagaccaaaggcaagtaggcataaaaaaatcccatacaggttatatggaaatcgtgtcagtgccataaggcaggcattgggagttagggaagctgcttgtgggtaagtaccattgccagcaaagtttccggcatcactccagatttggtaattataaataaattgtgccacatagcctccagcatagagcgtgcagaggcagattggaagcagatagataagcttccaccatttacggttcatgtaaaaacccccttctgaatttgttaaggtcaatactggagaattgaatgtctgctgtgaggtattctttgagaactgggatctggaaatcaaaacagatcaggtttccgtgtaggccgtaaacattcagtccggtattgaatcgattgattcgctgcatgtcaaaatcataagcaagaagtgcagggtttccatctttggttactgcatcatgctccagtggtatttcttcctggcgagagttcatatccgatagtaataattcgttaagctgttttgtcattgccgggtttgctaatagctgcatcaatgtttccccctgaagatcgttggggagataatggaaatgttcaaacgaggtgtccagtataaagaggcttcgcttgtagccaccagtgctggtcagcagtttgaaagcagtttccatattgtcaccaagcataattgcacgaattttcggatgtccggagtaaggatatccctgcagataatgttgcaggaaagcattgaggcgcacttcagttttatactcccacttgaggactccacttccggtattgtagatgacgtagatgcaatggggtgccatcaggattcccatactccgcgaatttttgatttttgttgttgccgccccaagttctttaatctctctggaagaataaaataaaggaaggcttcgcatatggatggaagcagcttcgcgttcctcagaaaaaatatgtggttttccatccggataaaatgggattccagcatggagtaacgtcaggtatgtttgtgccttctgatgaagacggatgcggcgtgacggttcgcttcggataacattagtctcagtatttccacttagatagcggtggaagcgggcaggatagtaggcgaggagcagttccttggaacgtttggtcagtcgatatcctctgagtttatccttatagtgggtgcggatgagcttatcagccttcagttcagtgatgattttttcagcataagaaggacttgtaaaaagccgattcaattgatccgcaggaaattccccacagattccgataagttccagcagcctgaatttctgagtgtctggtcttagcaaataagtatcacctcaattcattttttaccgatgttagcctgtacttgggtaaaatggcttttgtcagttggtagaaaaagcatagaaatataatgcttcaatcctctttttacctatgtcggaaaaataggtaagaaaatcaggaaatttccgatatagtttccaatagctctttatgcgctttcacccaatccggaaaggcagatttttccatgatgtagacaactgtcgaatctgcattaccaaattctgttgtatgataggaatcacagtacaatccggtatcgtccaataaaacgtaagttgctatcgtatccagaatctgcttgaattccagattgtcatagtcacgaaccctttggctggaaagagtacgatcataaatctggctgaagcagaccacacagtctttatacagagccaagtcgtggctttttacatattcctgcagagcataattcaagggctcatgaagaaatgccatattagtgcggacttttcttttggggagaagtcctggaagggtaatagacaaaatctcctgttcctgtgagataacgattccctgtgcgtctgcagcaagttttagataactgttcttgccagagaaatcattgatatagaccagattcctgagctggcaggtgatacgttctgatcgtaaggcagcatcggtgcttagtgcttcataatttgcactatatttttcaatgtctgtagttttcagagcaaaaagggtgtttctgagcttttctatttcgctttccacaccctgtaatctctgaaatatgattcttgtatttgtgttcatgaaacctctttctttttgtagtagctgacagagccgtcaggggtgaccatgcagtaggcaaccacaccatcaattgtgagttttcccgcttgtttttccgattcaatgatgatgattcgtaatgcttcccttggaggaatactttcaaacacatggttcatcagtgcttcctgtccattagcaacatatatgatttcataggtttcatcatgggaaaagaaatgtaatttaacgggaaaatcaccgctggtatggtagatgagtgcctttttaaaatccagcagaacccagaaggcagcaatagtccccatatctggtgaattagcagactcttcagtgtcgcatagtaaatgctgttctttatcatggtaaatccgtccctgtttagtcaaactggtgatgagagatttgatagaattcctgtttttatcaaaaagctgcagcacctgttcataatgcaaagcgtgatatgtagtgagaatccgaagaagggctgccccttcgcctttatatatctgttctcgtgttttcatagatggtctcccttcgtatttgtaattgtacgtatatctatacgtacagactgcgtatagatttctgtgcgtatggtgtacgtacagatagtggcctgctgtcagtacggttttggggtacaaaaaaagcaccgatcagggtgctgatgaataagaaaactataagcaatactcattttagcatgggtaaatttgcgttacaatcgcagaagtgtgccaattttgtgacagggatattgtcagggtgaaataaatgaattataatttataaagaagttgccatgaaccaaggataataaataattatctgctatatgtttaaggggtaggtatggaaacaagttataaaataaaaccaatagtaaatataaaagacaaagatttaatcgaggctcttgacatatatgtacatacaatagatcaaaattcagaaacttccacgtcggaaataagagattatattcaaaataagtataacgatactagaaaaatgtttttttacattttgtatgtaaatgatgctgtagttgggtttgcagaatatggatatcttccacaaagcgaagctttacttattgattatatttgtactagaccaagaaatcatacatacttctacactttttaccacatgcttttcgaagatatcagcatgcttctgaaaaggcaaaattgttatataaaatatataattacagaattatccctcaaaaaagatgctgataataaatatatagatgttgatagtaattattttagacagttacttgtaatggagggattcaaaatattgaaaacgccttactatcagccatattgtaatataaaacatgagttgtctttaatggattttaatattgctattaagccgttactaaacggatttttttcgaaaacagaaattgatgaggcgttttatatggagattttgacggatatttatctaaatcattatgttgcttggtatgaaaagtatatgaattcagaacaagttaagacatttttcaacgatttactaaaacgcatacgaacagaatttcctgataaagttgaaattgatgatataacattagtaaattgtattctgtttcaaaatggcctgtgtcaacagatatcaaccgaaaatattactctacagaaaaggcgcaaacattactttaaacgatgggtaataagtatagcttgcgtaatcttttctgtagctacaggcgtattttgttactttgatttttttaatgaagctgtaacatttgcttgttcgttacttaccattatttcatctgtgatagcattaggacaattcataaaaaccagatttttttaaaataacaatttcattatgtgcaaaaaagcgagaaaatggctgcgtaaagttatctaatttagagtattttgcagcctttttttctgaaactcctaatctaaaaaataacgaagaaatacagtgataccgatatattttctcacatgttaactggtaatatgctgctaactgcaaaacgaatttttcattatacatccataaataatgggtttggttattataattatatttttgcataaatatagttttaccatagttcggcgtaaataaaaactctgcactatttgatctttcaaattccaatatcaaaactccggttggttttaaaatccgagagaattcagatatagatttttgaatatcagcatagtttataacactaccaacacagattatacaatctgcggaattatcgtgcaaaggtatttgttctatagaacccactaaataattttcaaaacattcaacatatttttctactatatccatatatataatagttgcgtttgtatcataggttgtttttccacatccggcattcaacacaatttgcgtatcatctagatttaatttatttaaataggattgtacatttttatgtaaaattttatgcgtatataaatgccagatatcatcatctggccaaggttcggattttttataattttctttggcagtatattttacgttttttaaatttcttttttccatacctaccccttaaacatatagcagataattatttattatccttagttcatgactgatccaaattcataaaatttctcggatgctttgttgtcagaatattattttgcttggacatagacacacttgtataaatttccgtagttttgatagaactatgtccaagcattttttgtatataacgaatatcgacgtcagcctctaagagtagtgtcgcaaatgaatgccggaacatatgaggggtaatatgcatatcaatcatggctatattcaggtatttaacaatcattgcacgaactgattgctcggaatatctttgatgaagacgatttataaaaaaccaattggttgatataatgtcgtctttaaaaacagagtaatattctagtaggattttttttacatcatcgtttccaatttgaatcatgcgttctttggaacctttgccatatattattattttgtaagatactaaatccacttgttgtaatgttaaattgcataattccgatatcctgacaccagtagcgaagagtaattcaattacggcaatatcgcggagaatagaattccttttgcagtcagtgttagcgagagatttctgcttatacatagtggaaataaaggtttctattatagcgtctggtattgttcgtggtaatgtctgaggttcacgaaattttgcatttatcttgtcaaaagggtttgagaatattatctcttcacacaataggtagtgaaaaaaagctttaattgttgcaatctttctttttacagttttgggttgatattttttatgaagtgtagaaatatattcatttatagctgttttactagtaaaatcaggatatttcagcatgaaagtgcaaaattgagttaagtcaattcgataagctttgatggtttttttatctaatgtttttatggtttcacaatctcttaaatattttgcgattagtgtttctaaattttccatgaacaggcactccctaacttttttattgttaattatgagtgcctgtccataaattgtcgattactaatcggggaaaaactgattcagaatgtcaatggtttctttcgcagtaaaaccccagagaatggtactcagcgcttctattgctgcgtgacgtttccggtaataggtacggtaagagatattgctgatatgcggttcaagcttttcaaggatctcatccgtgtttttcagttcctgtggagacaggaatgcataatagagaatccagtaatactgttctccgtgcttatgattgttacggagaagatcaacggaagaatctaatagctttaacatcttgttactccgctcaatgctttttgccctttctgctatgtcagttccggataattctatccctgcagcataaacggaatctaaaaaatcatccacactggttccatattccatacggaattgcgcttctaactgccgaaccactaccttcaagctgtatgttgcatcccggtatcttcgcagaaacttgtaagtgtcgtggaagcggggatcttcttcaggagtcgcatagctttgttttttgtttctagccattctattcaccccctttcgcagtagccatatatgtttcagcaggcaggctaacggcaggtttttcttctggcgtgacagtcagttcaaaccgatatgcagcctttccgtaaggacagataatacttagtgtatattgatttactgtatctatgcaggctgataaaggagataatatatacctggttttggagcattcgcagcacggaatcccctgtgtttgcagtagttctgcgacttttttgatgataaatttcatgtgagaaaccggaacgcaggactcattttctggaacggtgatttgttcttccgtgacagtttctgaaacgcagacctcttcttcgatttcaggtacgtggattggcagttgcatgttcatagcgatttcctccttgtctatcattacatcactgatgtcaaacattacagacaggtagtagttaagatagatcatgctaccatgtttgcctttgaagctaacaagagtgatgaagtttaactcttcaaatttttttaagatacgtgatatagtggtttttgaatgtccccaacgttctccaagtgactggaagctggtcaggggattgcctgtgttatttcggtaataaacaacaggcgcagagaatgagccttgtacggttggatcattgtatatagcatgaatccacatatccagtaacatatccatctctgagcatttccccaggctgataagttcatggacttttgcaatagggaaaaagaaaaatccatcatcctttttgcagggacagttgtattccagaacggtattgtcctttgcccagtcagtgatcttaaattttacgattttcttatttccaagaagagagtatgtaatgcaattttgcttcaccagaaaatctaaaatagagattgcctgatgctggaaccggcagcgaaaccatgtttgaagatctgaaagggtacagatccattcgccgggacctaccatgtaggtgatgtgttccattcgccgataagacgagcggtaattggcataagagcaaagcacgatatagtaaaaaagaaaagagcctccgtttgtgcggatgctcttgtcagcgataagtgattgtataaaatctctgtagattctgcaacgtgggaaatccacgatttgttttaattctaattgatagtccataaaataacctcacattctaaaaaggtattgaagtacctccggatacgattctttgatagtgaatcaggtgtacctcattgcatttctattgcatttttgatatcttttcatactatttcaaactatccaatattgcctgaaaatggcttaaaatcgttgattttgctttatattgcttaccgtcaaactggagttcgaatagttactacatctctgaaaagccttgatttataaggcttttcagagatttttctttttgttggctacaaattggctacatctgccatttggctactatctgggactgttgttccgttgataagattttcaagttgttgtgcgacttcggcttgtttgtttggatacagatgactgtaagtatttaaggttgtctgtattttttcatgccctaaacggtcagcaatcagaagtggttggcatcccatttcaatcaaaaggctggcatgggagtgacggagatcatgcacacgaatcttcttcacaccggattttttacatcctctgagcatttcatgattcagaaaacttttggtgtaaggaaacagtctgtcatttggctgaatctcataacatttatccatataactttttaaacagtcagcaagtgtctgaggtattgtgataacccggttactttttggcgttttaggaggccagacaacatccctgccattgattctttggaaggttttgttgatggtgatggtattattttctaagttcacatcttccggcgttaaagcgcacaattcgcctactcgcatgccagtatagtacatggtcatgaaggctgtataagaagctggtttatcctgtacagctgtaataaactgttcaaattctgcctttgtccagaactgcatttcttctgcattgctttttcccatgctcccagcctttgtgcatggattttcccgtaaatcataatatttcactgcatagttgaacatagcagtaagctgattattgatcgctctaaggtaggtctgtgcataaggcttcccgttcttatcacgatatgcagttaatccgttctgccatttacggacatcctttggtgtaatctcattgatcgggatttttccgaatactggcaggattttcttatctaccatataccgcttgctgataatggtagattctttcagacggtgtcccatatcctcaaaatatagatctacaaaatcctgaaacatcatacccatatctgcattagctttgttgagaaagtatctttcccattccagagcttctttttttgtggtaaaaccacgttttttcttgtggatagtctttcctgtgtagtctttgacacgcacctgtgacatccattttcctgttgtatcttttgttactgacaattacatcattcctttcataagagctttttgctcgtctaattcaggattatttgccagaaaaaagagcattcattctttttaatcgttcctcagtatcgagattttccggttcttctatctctacaccctgtgaagcatagtaggcaagagttttgtctttccaatcttcataggaagcttgatccatgcaatactgctggaaagattccctgttattttcccattcctcaaggaacaggcacatatctgcattctgatcagcggatttgtcttttccgtcaaaagttatggagcattgccagccatcataatgtggcggtctttttgtttctatggaaaagtgcagtccgcttattttttccaattggaacaggcattccataacgtcagagagacagtcaaatttaaaatccccagtctgatgtccgagaagataggtagaagtagtatcgagcactttagccaattcattgaccattgcgattgatacttcaatttccccgctttcatatttttgaatagtacggagagattttccaagaaggtttgctaaatctttctggttatatcctctttttttccggagtgttttaattcgttctcctattgttgaaacttccatattgttcatgttttattcacctcatggataatataacacgaaataaaacgaattgcaagtgcgtattatttaaaataattgttgacaaatgtgaaagatagatgtatgatacgaatacgaattaaaagtacatattaaaaacgtataaaataatttatatgaaatgaaggcgtactgtaatagcactttcgatagatagaaaaaagaaaaggaggattttatatgcagattaatgtatcttatattaccgcaaatgacattatggagattctcggggttgggagaagcaaagcctatgaaattgtgcgggtaatgaatgaagaactggaaaatgccggatataacatcatcaaggggaaagttccggttagatatttccagaaaaaatattatggctgtgagatgaaaatggaatgagtatctttcagacagtaaaagaaaatgtaactgcaaggcaggcggccgaacagtacggattgagaataagtagaaatgggatgatctgttgcccctttcatgatgacaggcatcccagtatgaaagtagacaaaggattttgttgttttgcctgtggtgcgaaaggggatgtgatcacgtttgtggcagatttctttcatcttgcaccattggaagcagcaaagaaactggcagaagattttcagatacctatttttatagataatgcaaagaaaaggaatgccagtaagagaaaagaaaaaccgaaaagaacattgtaccagaccgaaaagaaatttgaagaatgggaacaggaaagtatccgcattttatcggattatcttcatttgttggaagaatggaaaataagatatgcaccaaaaacaccagaggaagaatggaaagcagaatttatagaagcctgtcagcagatagaaaagataaattactatctggatttactggtgtttggagagttacaggacagaattgaatttttactagatagtgggaaggatgtgaaaagaattgaagaacgaatggaagaatatagacgaaacaacaaggaatagagtggaagaagcattgaatcagagagaaatgaactttaaagagtactctcaggaatggtttgaggatgggcagattgatgaggtggcattttgtgaaaatttcctgcaaagaatgccattgaaatgtatcaacggtatctttttcagctatgatggaatgctgccggatagcgaagtggaaaaagaaatttacagaatggtaaaaccggttcttacgaaagggatttccaagaaagtaaaacagcttttggaggttcttaaactggaagcctattccgaagaacttccggtgcagatggaccgcatccatgtgaataacgggacttattttctgaatggagatttcacagagaagaaagagttttgcctgaaccgattacctgtaaattatgaaatgaaagaaacaaagccagaacggtggttaaaatttctttcggaactgttggaggaagatgatattcctaccttgcaggaatatatgggatattgcttaatcccatccaacaaggcacagaagttattgattatcttaggaaaaggcggggagggaaaatcacgtattggtctggttatgagaaaaattctcggaacgaatatgaatgtaagcaatattcaaaaggtagagcataatcgttttgcaagggcagatttggaatacaggcttttgatggtggatgatgatatgaaactggaagcattgaaagacaccaactatattaagaccatagtcaccttggaggataagatggatttggaacggaagtcgaagcagagcgtacagggaaatttatatgtcagatttctctgctttggaaacggaagtctcagtgccttacatgaccgttcctatggattttatcgtaggcagatgatactgacagtcaaagatgtgccgccagacagaattgatgatccttatttgattgagaaactgcaaagagaaacggatgatatttttctctggtgtctggagggattgaaacgattattgaaaaataattaccgatttaccatcagcgaacgtgcaaagaaaaatctacacgaagctatggaatctggaaataatattatcgcttttatgcagtcatctgggtatattcggctggaagaaaatacaacagcaacttctaaaaatttatatcaggcatactgccgctggtgtgaagacaatacagaaaaacctatgagtgcaaaaagtttttcggggtacttaaaagaaaatgaaaagaaatatcacattcattattctacgaatattccctcagacaatgggaaaaatgccagaggatttcagggaatccatacgcagatacgcatagacaactatcgttgatgcagatgagatacagataaaaaagaattttccaaagaagcgtatatgcgtatatctttaggaaaatcaagggattacaggtttctgaaaagtgtggaaaatacgtttatacgcttatacgtgtaatttttgaatttattatattttttagcagaagggagtgttgcagaagttaaagcagcccagatacgggcaaatcaaaagggcggatacgcccataaatgaaatcgtaagtctgagcaataatcagattatgtaatacaaaaacagccctcggcgattgagagcgaaatacacccatcgcacaaacctacggtttatactctgtgtatttcgctctgcgaggcttatgccggatacggcaatcagttcgtaaacaggtgcctatgcacctactcacaataaaatcgacgagagccgggaaaggaggatgcttataggcagacattcatttattagacaaagtaagctgtccaatgtggcaggaaggattgattatatctccaatccgaaacgacaggaatatctctatgcgacctaccagacagaaggagcaacaccagagttttggaaaaatcttgcaagagaaaatcagttggactttaaggcgagcggatcggcagggaaatgtatcgaggggcgtgagtttatcatagcacttcccgaaagttttgttcagtacagggcagatgatgtggtaagactttttacggaaacttttcataaaagatatgatgtggagtgtagcgctgcccttcatcacaacaaggcaaagacgaattatcatattcatcttatattcagtgaaaggaaaatgttggagcaacctgaagtgaagattgccacccgaaatatgttttatgatgaacagggaaagcatagacgcacgaaaaaagagattttagacgagcagggaaatatccgagcagggtgcagtattatccccaaaggcgaaatttatgaaagccatatcttcacgaaaaaggatgaatggtttaagaacaaagcatttaccaaagaagtcaaggaactgtttaccgatacgatcaaccgatatgtaaaagaggaatcagaaaaactctctgtattccagcaggacggtgtatatctggcaaccaagaaaatcggaaagaacaatccgaaagcagaggagataaaggcagacaatgctgcaaggcaggaatggaattggacagttgatgtggcattggttgagggggttccggaggaaaagatactggaagtgaagcggacagaaatcacggacaagatcagacagtctattaaggacaacggaagacagccgggatttttccgggtaatattgacagtagcagtaaaacttctgatggaatatattcagaaactgcggataccgcagaagccgaaactggaaattgatattcaggaatttaagcagatggaaaatctgaaatatagattggacaatcagctgaaagcaatatggcaggcagaaagcgtagaactttcaagattagaaaaagagctacagaatattaccgggttctttaaaggaaaagagaaaagagaggcacaggcgaaaattgataattgcaaaaaacgtatcgttaagatgaaaaatcagttgaaacagattgtaaaggaaagtggttatccaacagtaaaagagtttttgaagaattacaataaggcatatgagattgtagcagagtacaaagaagaactgagattgtggaagctgaaaaccagaaaagaacagtcaaagcaagaacagagggaaagtgttctggagaggcttcatacgaaggtgcagttggtaaacaaaagggaaagaaatcagcagcattaccgtcaatccagagatcgggatgcaagataactgggcaaaaatgagaaggctcctgctggaaatggcgggagcttatttgtcatcacggattttcaatatatcattcggagtacaatcgaggtattcacacaactttacaagagtattcaaatctatccgggataccttgttctggcagtaattattaagttgtgttcgctgtagtctgcagttctcacagatcttatttttactgataccacgttctttcaataaattttctaaatcaatatatatcatcttcataaattgtcccctattcttttagataattatagatagaactgtattgatttataagatgtattgtaatagactgtaagtaaatacaggggagtgaaactggatgaaaagaagaatcatatctattagaatagtgtgtatcacgattttattattatgcgtttatctgcagtttggaaaagaaatggaagtgtataacagcacttcttttacggaggcgaactattgtgaagagcatttgaatattgtggtaaataggttaatagtaccggataaacagaaagtagcggaagaaatcatagaacattgccagaagaatgattttaaaaatgttattttcagttatgatgtggcatatccaaataaactggaagtcggcgtgtatttgtcaaaatggaatactcggaaagggaaagaggagttttcatttgtttatgatacggagcagggagagcttggagaatacaatttcatagaaaatccggagaagtttagggtggaaataaaggagatttaatggattgccattgtaaaggaggcatagtttttgttgatttgttttgataagtaacccttttttcctttttgataagtgaatgtatcaatatatttgataaaaacagcaagaagttgtgaaaaatatttataaaatcgatgaaaaatgttgaaatattgactttcgtgcagtaatatatttttataccaaggagaagtatatgtagggagaatttgttatgaaaatgagttataaaaaattatggattttactcgttgaaaaggacatatctccagctatgcttagaaaagatttaaatattgcgtctggtactatgacaaaattgcgccggaatgaggaagtagcactttccgttcttttgcgcatatgtgagtatttggattgtaatattggagatatttgtgatgctgtgcgaatagatgagtaaaagtctatgttttcgtgcggcaattttttgtttagtatgagctttgcgatgaataacaatagaaagaaggtaaggttatgttttgttcgaattgcggaactaaattagttaaaggagcaaaattctgccacgaatgcggttcgcctgttgtgggtacctcatcaaaagcatcggatgtgattaagacagctacttctgtatcgatgcaagaggaggtttcccaacgtaaacaggaatatgtaggaaaaattttgaaatgtcctaattgtggatcgacaataactgaaacaacagtaatctgtccagattgtggaattcgtattactgggagaaaggcagtttcttcagttcaagcattcaaggatcaattgatggatattgaagccagcagaaaaaaatcgaaatttgtggacgtatatactcaatctgctaatcctgcggatacacaaaaattgtctttaataagaagttttcctattccgaacacagtagatgatatacaagaatttatttttcttgcaatagcaaatattgatgttaaattatcgaagcaaactacggcgggtaaattttccagtatgataaattctggaaatgtaaatttaacaatgcaaaaaactattagtgatgcatgggtttcaaaaatgcagcaagcttttcaaaaagctgagatttcatttccgaatgattcagcctttcagaacatacagaaaatgtattttgataagcttagagaactaaaaattaagattaaataacgtgaattaggaaagtgaggaaataaacatggcattatttggaaagcctaaagcaggtggattcatggatgaaattcgttgtgatgaaccttcttatttaatatggaaatggcatccaagaaattctcaggaaggaaataacaatagagaaaatgctattcgttggggttcgtctttgcgagtaaaagatggagaagttgcagtctttgtatataaacaaaaagacggtgcaatgcaggattatatagtaggaccatttgatcaaatcatcaaaacagccaatttacctgttcttgcgaatatcatgggtttggcttatgaaggtgggacaccttttcaggcggaagtatattttatcaatcttgcccgtattattcaggtaaagtttggcgtccctttctttgacgtgtatgatccgagattctcagactttggtgtgcctattgcagtaagaggtactgttagctttagaatcagcgactataaggaatttattaaactacatagacttaacgagtttaatcttgaagattttcaaaaacaaattcgtgatactgttgctcgttatgttaaagatacggttgctaatgcaccagccgttaataatattccggtcgttcagattgaaactaagacagcaatgattacggatgccattgagtatgatctcagtatgcgactgaatgaaaattttggtgttacagtttctggtgttgatattggtgcaatagagattgacaagaccagtgaaggttatagacagctcatggcggttacaagagatgtggctggtgcaaaagttcaagctgaaacgacggattatgttgaaagattacgtattcagcgtgaagaaggacagtatgctatgcataagcagacacagtctgcaaacattggtgcatttcaagtggaaaagcaggctgaagttggtattgcaggagctaatgctttgggacaaatgggaacaaatggagctggtgatataaatctgtcaggtggcagtagaaataatggcgatggttttaatatggctgcaatgatggcaagcatggcagttggaggtgcagttggacaaaatatagccggaacaatgaataatatgatgtcaggtgtaaatcagccagtacaggcaggaatggcacctccaccagttccaacaatttcatatcatgtagctgtgaatggacaagcaacaggtccatttgatattactgcattaaagcagatggttactgctggacaacttactttggacagtttagtttggaaggttgggatggctgagtgggtaaaagcaggaactgttgatgaattaaaaaatctgtttgtgactatgtcgccgattccaccagttctaccaacggaataacaaaagttacgataaactgaaacttgcaatccatagctaagcaatagttgtgggttgcattagcggagaggaaaataggtatgcaattgtgtgttttaaaatgtcctgagtgtagggctaaccttgaaattgaagaagggcgtactttttgttattgtcaatactgtggatgtaaaataatgcttgatgatgaaaaagaagagaaaacaatcaataaaaatataaatattacgaaaaatgttactcataccaaacggtatgtagatgaggcagaaataattaaagcaaccaacaaagaaaaagaagataaacgaagttggatagtgctaattgtatgtatggttattgctataggtattccgtttggcatgttaacaaagtttgatatagaagaaaaaatagcggaaaaagaaggaaaagtatcagttggattttacagagatttggaaggtcaagattatgaggcagtggtagctcattttaagtctgcagggtttgagaatattgaagttatagatttaaaagatgccggtattgtattttggaagaatgataaagttgaacagatttctgttgacggtaatacatcttttgacagtactgattatttttcaaaggattcgaaagttgttatttcgcatcattaagttataacaataagacaaaggaaattcaatagaattaaattgaagaggtaaaaaatgatgaatagaattgcattagtaattggtaattctgattatttgaatgtaaataaattgaacaatcctaagaatgatgcaaatgatatggaaagtgttttacgtaagttggattttgatgttacaaaagtgttagatgcaaaattaatagacattcaacaggcggttaatacttttttgcaggcgttagatgaatatgctgtaggtttattgttttacgcaggacatggtatgcaaattgatgggagaaactatatcattcctgttgatttagagttaagcgataaaagtaaaactatggtatcttgttattgtttaaattcttttttggaaggtattgcgtcatatagagggaaaacaataatctgtatactggatgcatgtcgaaacaatccttttgctatgggaagaggaatgttaatgggttttgctccatttgataatccaccaaaaggaactataattgcgtattctacaagtacggattgtagtgcatttgatggacattgtagtaatggattgtatacacaagttttaaaggattcaatgctgattccaaatttgaaaatagaagagatgttcaagtctgttagaaataaagtgtctgaaatatcaattagccaatacaacgaagaacaactttcatgggaatattcttcgttagtaggagatttctatttttctgttactcctcagccagtggatatacatattaaagacgaagaaatttatgagttcatatgtttacgtcataagttctatgagaatatctctgaaaatatttatgatattgaatgtttgccatatgtagatgcttataacaaatatcatataccaatcattaatattttacgagcatattcaagaatagattatcagaaaaaaggatatcgattttctgatgctacgattgatcagataaatagcaattatttatcatcatggggatttacacaaaaatatggcagatggtactatgagaatcattatgttgaaatgggtgatttattgccgttaccagaagaattggaacctaaggaccctatcaaaggtaaagaattggaaatagaagcatctttggttgcagaattaaatgatggaaagataagatttcaagtatcttctaatattccggagggaacccccatattatttacattggaaggtaaaaaatatagagctcaatgtaaatctacggtaaataatagtattttgacaagcgagtggtttagtgataagggaaatcctataaaaaaaggattctatactataggtgtgtcctgtccgatagatagggtgttaccagacaatgtaaaaaaaatatttggtgaacgtaatagaaacatatatgggaaatatgttaattttgaaccgattggaggaaatacgattcatttttcatatggattgttgattgaaaaaaataccgttaaattaatcgatatgcaacaaaagattacagaactttaaaatgaatatattttttgcttgcagaagaataaataaagtctggttttttgctgaaaactataaagtagaggtgtaatcaatgatggtgaggtgtcgtgggttcgtaacgtgtttgcaacaatacaccgccaagtttcttgatttgcaaggctttacggttacctaaacgttaatttcagttaagaaagaacttgcaagccaccgggtaaaactcattttgaatatgaaaaaactcgggaatagtgaatgagttatattgaggtgaataaaaaatagtggctacattttggctacaaaaacattatggacaaagtggattgtgcggataatcaatcataaaacacacataaagcgaactgataatgcactttataagtgttcgcacgaatgcaaaagacgagtttgagtagttggcactaggccagaaagcctttgtttgggcttccgggcatcggcggtagtgtagcaaattggacctgttgacaaacttcctttttctaatgccgttttagcatacgctctttgaaatagcgtaaaaaggctggtaatccggttctttataccgcttttaccagtctttttagatttaatgcggttgccgataagaggcattcttccgtcgctttctgaaggcctcttttctggatttaattcaatttatgttctcgttttaaaaccgtaaatgtcccttcagcccatatctgcctgagacgcatgactctcaaataatcactggttcctactttctggttgttccggtgaaaagatggatattaggcactggcattgatcctgactgtatccaaatcagtggcacaagtcgaaaaacttgggcattttttacattagattctgacatcgtttgcaattgcaatggaactggagcaaaaagcacagtttcagccggaggatgtggttcttaccgggggcagttgctttacccaggtgctgagtgtacttctgctgatgccatattcacgttccagttgtggatacgattttccgtcggcgttatacaaatcaacaatttgctgtttgaactccagagtatacgatttttggtttttcgccatgttgaacatctcctttgctatttcgcttgctattatagatggttcaactttttctgcccacacttatatactaacaccacgaattattaagtccgaacacagtaacatcaacctgaatgtgatacgattctgacctaatactctcgctatgtttgtaaatacatgggaacagcggcatctattcagtctccaaaagcagttcttttcttgataatagaggataagcatattatttctattcattattctaaccaaacactgacacgattgacctaataattgacaacataagagacatttagaggagtacgatgttcaaggaaatctatgaaaaaataataggatccatacatctatgtatgtgatcaatacggaagaggtatctattatgacatctaggccattccattaggaattattggtatgaaatggactttgacggagacgatatagaatttaatatattttattttccagaaatagaatgatgctactcgttaggttagcttttgggcggtaatgcttttatagtttcccgggcatatagatgtagacgtctccgtataatatagatggtatttccatgttgtgttcctatcacttttgacaatgatatgatataatttataggcaatggcaagaaggtgatagtgaagaaaatctaaatcttttacatgataataggatatattttcttcagcctgatctaatcataattctatatctatcagtattttgtgaaatctgaaatagagatatattaaataagaataccaggagaaatgcatatgcccaaaggagcaaatcaaaagttcaaactatactacctcatgaaaatcatgctggaaaagaccgacgacgagcacagcatcacaatgccggagatattaacagagttggagagataccaagtctcagcagagcggaaaagcatctacgccgacttgcaggctctggaaaagttaggtgtagaagtcatcggagagcaggtcgggaggacgtattattaccatgtgggaagcaggcagtttgaactgcctgaactaaaactattggtagattcgattcagtcatccaaattcataactgccagaaaatcgaatgaattgatccgcaagctggaaagtttatgcagcgagtatgaagccaaaaaactgcagcgtcaagtatatgtgtccggaagaatcaagacgatgaatgaaagcatctactataacgtggattccatacataatgcgattacggaaaataagaagattatgtttcagtatttccagtggaatctgaagaaagagatggagttacggcataatggggaaatgtaccatatcagcccatggggattgtcctggaacgatgagaattattatctggtaggatatgattcagatgatcagatgatcaagcattatcgggtagataagatgcttaagatccgtatgtctgatgagccaagggaggggaaaaagtattttgagaaatttgacattggcacttattccaggaagaacttttccatgtttggagggaaggaagagcgtgtcagattgctgatggacaatcagatggcaggggtggtcatagacaggttcggaaaagacgtttccatggtaccggtggatgacaatcatttttctataagtgtcgatgtagtcgtaagccagcagtttttcggatgggtatttgcgcttggaaagggagtgaagatcatcgggcccgagagcgtggtacagcaagtcaatcaggaaataaaaagattagtcgaacaatataatatggaataagttatagaatatagcagggggctatcgggaaatagatagttccaaataggggcagatgtgactcataccaggtcacatctgcccctgaaatttttccataaaagagaaaaagatggctaacgacaaccatctcttctccgttacatgttataatgtaactatgctaaacaataagtattataacgaattttttgaattagggcaacagaaaattaacttcagtttcttcgaattgtgtttacctgacgacgatccagtctataccctgaaaaaagtgatggaggaattagatttttctggcttgttggccaattgttcagataagggaagaaccgggtataacccaattatgatgtatgccgtagttacttacgcaaacatgcgtgggattagagctgttgaccgtattgtggaattatgcgaaagagaccttgcatttatctggcttaccaaaggtcagaaaccaaaaagggatgctttttatgagttcaagaataaaagactgactgcagatgtattggatgagttgaattaccagtttctccgccgcctgcaaaaagaaggactgatcacattgaaatccctttttattgatggaacaaaaatagaggccaatgcaaaccgctatacatttgtgtggagagggacgatcaattatcatctcgcaggcttactcgatatgattgattcactgtatcagaagtataatgcatggatagatgaaaatgagtatggcataaaatatgacattccccatgcacatatgtttgtgatcgaaggaatggataaggtaagagatgtcattgaaaagaaccggaagcgaaaactgacaaaacataaaaagttgtccaataatacgatcatcgagattgacaactgttccccattggagattttgaaacttcagaaaaatctgactcagatcgcagagaaggaacagattgcgtttgtttacggaaaagggaagaggaaatcggagctccagcagctttatgaggaattagaaacctgcggcaaacgccttatgggatacaaagaatgttttgagatcatgggaaaggacaggaacagctattccaaaacagatttagaagccacctttatgagaatgaaagaagatcacatgctgaacggacagttaaaagccgcatataatgttcagatcgcagtagagaattatttcattgtccatgcttatgtaagcaatgaccggacagactataacacactgattccggttttagaaaagcataaaaatgcatttggggagattttggaagaagtaaccgcagatagcggttattgtagcgagaaaaatcttctgtatttaaagaaaaataagatatccagttacatcaagctgcaggatcatgaaaaacggaaaacacgcgcttacagagaagatattggaaaatattacaacatgaaaacacagatatttgaggatgaacggtattatgtttgtcatgacggaagaggattgcatcatatccgcacagagaccaaaaaacagccgggttatacccagacttttgaggtatacggatgtgcagactgtagtggttgtgaacacaaagcgaaatgcttatataaatataacgcagaaaaagatgctgagaaaaacaaagttatgaagatcaatgaacaatgggaaacattgaaagaggaatcccatgcaaacatccaaagtgagaaagggagtctaaatcgtcagatccgttccatccagacagaaggacattttggagatatcaaggaaaatgatagtttccgaagattcaactaccgaacgtcagagaaggtgtataaagaattcatgctgtatgccattggtcggaacatgaataaatatcatcgttttcttcatgaagagattaaaaaattcgaaggaaaaaccgaggaaaagacggcttaaaaaatgtgcatgttcaaaaatgcagttatgggtgttttgcgccctaaaatatatacagaaaaagaacaataagaatctcccacagaatatcaagtatgaaaaacactgatttttatgggagattcttattttaggatttagagtttaaaaatcggtattaaccgacatcccccttttatgttggtatttttattggacacctaatggggtaaagttaagtcaagaaaaccgataagaacgacataagaaagacacgaaatagaaaacaataagtttggattcatgataaggaggcaaggaatatgaaaggatatgcagtagataatggttacatgggttatgtggatggcgactacatgctatttgcaagcgaattggattatagcgagtatctggatgaagaataatgaattattatgtgatgccagagagaaccctatgcaaactgtcaaagaaggattcggccaacaaaggatagaaacaggaagatcttaagatatctcaaaacgaaaataaaccttcatcaatttgaaggtttattttcattcaaagaaagtatcaaaaatcaaacagcattttaatcttatatcaaaaatctaagcgatttatccacaaaaaacaaaaaataaactctttctattgtaataatacacaaaaataagaaatttaatttatataaaaggctgaaatgaaatttaatttctaatacagattgacaattaatttcaggattgctatgattatgacataaaatttcaggcaaagccgaaagaaaaaaggaggaatagtatgaaaaaagtaacgttgttgaaaaagggcttgtcggcagttctggcgggaaccatggttctggggcttgcagcctgcgcaagcggttctggcggggattcgaaggacgaaggcggcgacaagagtgtgacgcttaagtggcagcagtggtgggcagtggaatgtccggaaggctacgtgcaggacattgtggacaagtacgaaaaagagactggcgtcaagatcgaactgctgagcgcgccgttcgcggatacaaagacgcagattacctcaggagccagtaccggaacggtagcggatatcgtcagcgtagacagcagctgggtatacgatttcgcggaccagggcatcctgacaaatcagtcggatctgatggacaaggatggttttgaccaggacatcatcgacagcgagtggcaggtagacggctctacatacgcggttccagtcgttaactttgcttatccgatgtatgcgaaccaggatattctggatgaggccggggttacagagcttcctaagacttggtccgaattcgaggcggcatgccagaagattaaggatgcgggatactatccattcgcgctgaatctggatacgacatctccatcaggaatccagaactcctacatgggatttgcgtgggcatccggaatcaagatcaaggatgaggacggcaattacaatatcgctgacaatgcggatatgaaagcatttgcagagtatatgaagggattaaatgataagggatatatctatccaggcatgagttctctgacagaggctgatatgtcttccaagttctgcagcggcgagattgcgttccatatcaactctgcggctcttcttacttcctaccgcaaggaagctccggacatgaacattacaggagcgccgattccggttaaggatgactacacaggcgacaagggaatgtgcgttgcaagctgggctcttggagtaacggaaaagagcgagcacaaggcagaggctatgaagtttatcgaatatctgttaagcggagcggacggaaaagacggatccatctgtgcagacctggcagtgacacagtccgcattcccgaacagcacgcttgcgaagccggattacagtggagcggatgaagtattccaggacatctacgacatgtatcagggtggctatccgatcaatgagttcacgggcatgaaggaagcaaataccatcatgacagactacatcaatgaacttgtgccatatatggatggcaagcaggatgtggataccttccttggcaaggtgcagaaagatattgatgaggtatatggcaagtaagcgaacgagaagttagcatccaattgtaatgaaatgcgaaaatggagtcatagttcttgtggctccattttcctttatagaagagatcagatggagtgagataaactgatgaaaaacaagagcggtttaaaattgaaaaaacagattacgccatatttatacctgtctcccacagtgatcttaatgctggtcctgctggtggtccccatctgcctgatcgtgaagtattccttccagaataatgcgatcgtagtggccgaccctgtattcgtaggactggataattatatagaaatcctggcagacagcgagttcgtgggcgcagtcaagaccacgtttatcttcgtggtagtgagcgtcgtggcccatattgtcctggggatgtgcttcgcgcttctcctgaacacgaagtatttcaaatcaaggacgaagaccattgccagagtcatctatgtccttccatgggtattcacggcatcggtaattgcgattttgtggaaattgatgctgcagcccgccgggatcgtggattatctgctttccttcctgaatctggccacaaaggatacggagtggctgagcaatcagagtgttgcgctggcgaccattacctttgtcaatatctggtgcggatacccattttacatgatcagcattctggccggattgcagggcatatcggaggatctgtatgaaagttccgcgcttgacggggccacaaaatggaaatccttctggcatatcacgattccccagcttaagcctatcctgatcagcatcgccatgcttgactttgtgtggacgcttcagtcttttgcggttatctggatgatgacaggaggagggccggtcaattcgacgcagacgctcagcatctacatctacaagctggcatttaacagcagccagtatggcattgcatccgcggtggcggtgcttctgctgatcgtatgcgtggtcgtagccattttctatgtcaagcagcaaaagaaagcgagggaataggcatggtaggaagttacaagaagccgattaaggtgattttgagtattttactgattctgggcggagccttcgcgggatttccggttttatggatgttcatatcatctttaaagtctaacacggagatattctcctggccgccgacctttattgacaaatcattcagcctgcgttcctatatcgagattctgacggatgcggaaaaggtccggtatttcctgaacagttactttgtatcagccgtcgtagtggtgctgacgctggtgatcgggattctggccgcttatgcgttcagccggtttgatttcccgttaaagggactgatcaatacgctgatcgtaagcgtgcaggcggttcccccgatcgtgcttttgattccgtatctaagcctgatcgtgtcgctgaaactgtttaatacatattgggccctgattctgacctatctggtattcacgctgccgtactgcatcctgatgatcaccggatatttcaacacgctttctacggatctggatgaagccgtcatgatcgacggaggatcccgcatgaaagcgctgtggaagattctggttccggtgtccgtgcctggcctggtatccgttggaatgtacaccttcatgcaggcatggaatgagtacctgtttgccctggccctgacccagaccaccaatatgcgtacggtgccgatcggcatcaacatgttgatggggcagcatacctacgactggagccagatgatggcgatgagtttcttaggctctcttccggtattgattctgttcatcttcttccagaaatactttatcgccggaatgtcatcgggagcggtaaaaggataacaggacagaaaaaaagagagaaaggaaatgtaggaaaatgggtgaaaagatagcattagggttccacacttgcgttgattttgaaatgacttgggacgcaaaggtggtggagcagatgatccgggagtttgacgtccgggatgccgatcttgcagacggcgatattccaattgactcggtgcgggcgcttctcatatccagcctgtggcatatgaagcggggaatgggatgcgagctggtgcccgacacgaaccagatctgcctggacttcgctaatcggttccagtaccgcgtcaccatcggcgggacggcgacacgcgccgcgatcgcgattagcaagctaggatacgagagtgcgatccagttatgctgcttcaaccgttttatgaaggagtttctgccaaaggaaatccattatatggtaggtgttcagcatgagagggaagaagtctatcctcatgtcatcctgtcctatcagggcggggtgcgtatccgggcaaatgacattgattttacgacgccccgggagaaccgggtgatgttttcccgggatatcgacagcctgctgatagaagtttctgaagattacgcgccgatgatacaggatgcggaagcattcctcttatcctgcttcagcgagatcctggatgaggagattctggaagaccgcatggatcggacccggagactccttgggacgcttcccaaggacgccatcgtcgtgatggaggatggatgctatattcgcaaggatttccgcgtctatgtgcatcaggcgctgcgggacgtggtggacgttctgagtatgaacgaggacgaactgcaggaatacatccagcgcaggatcgacattctgaatgtggaagaggttctggatgcggtaagagaggtgtatgagaaggtgaaggttccgacgcttctggtccattcggccgcctgggcgctgacctatggggaagatgccagaaagtatgagcgcgccctggaaggcggcatcacgatggcagccacccgcttctggcgcggggatgattttggaagaaaggagtatgaggagacggggcggctggcggcaaaggaagagggaaaaagattccgtcaggagattgaggagcgggcaggggaggcggtctgctgtgttccctgcaaggacttacgtttcgtggagaatccgacggtggtcggcctgggcgacttcttcgcgggcggcctgcttccgcagctgactaaggaccggcgcatataggcgcagaacaatggttgataattaaagattagaagaaaggatgattttatgtacgagagagtggaaaatattttaaaaatggcagaggagagcaacacttcagccatagcatttatatgtatggatgatacgatggcaagatccgtcgtatgcgcggcggaggcgacgaatacgccggcgatcatcatgctctatccggagcatgtcacgatccagaagacctgtaacctcagcggattcgcagccatggtagaggagatggccaaagaggccaaagttcccatcggcttgcatgcggatcatgattatacctatgacgcgatcatcaacacggtcaataagggattccgttcggtcatgatggatggctccatgaatgatctggatacgaatattgcccttaccaagaaagtcgtagacaaggcgcatgaactgggggccatcgtggaaggagagatcgggcacgtaggtatcgcggcaaatgcggataacaacaaggaggacctatataccaaggcggatgccgcggaaaagttctgccgggagacatgcgcggattctctggcaatctccatcggaaacgcccatggagagtataaggatacgccgaacctggacatcgcaaggctggaagagattcacgcagccgtgaatgtcccgctggtactccatggcggcagcggtattccggatgaacaactcttgattgcattttcaaaaggaatccgcaagtttaatctgggaacagaattcctgggaagatactatgacgcggtggcagagttcgtaaaagaaaacgccaagaacccggatccagtaaagatcatcaacctgccggaatacgcaagggcgcgtcttgtgccatatctggaagaaagaatgaagaccctttgcaggttctaaaaaccaaaagtcttaaaacacaattgaattcgttgtatataaaagttataatgcttataggaaaaatcatccagagcaccttattttcatcagggggaggacagaatacacaggatatggatattctccaattccacagaaggaacataaaaatatgagtgaaaaaagcgtaatcgataatatacagaagcactatcgcgaattctcgcctacagagcggaaggtagcggattgtgtattaagacatccaaatcaggtaacagaatatacggtcaaggaactggctatggcaagcggggtaagcgaggcgaccgtcgtgcggatgtgccagcatgcgggatacaccggctactggccgttccgtaccatgctggcccgcgatatgggaatgatgggaagagaagaaaaaagggataatgaccaggccaatatcgtggccggcatattccggaaatatgcggatatcatgcagaatctcagcagcaagatcgatctggatgccatgagcacatgcgccaggctgattgacaattgccatgaggtgcatgtgatcgcggcgggagatacaggaaccctggcgaagcatatgggattctgtctgggcaggatcgggatcaaggcgacttacagcggacttgcggattattatctgaataccatcaaccttgccgatgagaatgacgtgctgatcgccatatcaaagtcggggataaccaagacggtcattcagggagccgaacttgcgaaggaaaaggggctgaaggtgatcgccattacagaatacggcaactcgaagctgggagaattggcagatcacgtccttctttccaaaggggattcctcccgctttgattattataagaactataatcacttaagcgagacggcggtgatcgaggcgcttctggaactggtcaagaacgtggacaagatcgtggagaaacgtgcggaccaactggagtttatgctctcagaggcgaaattatagcaagtttgtgcaagaatgtaaggtgcgggatagaataagcgccgcaataggatagagagtttttagagtaggctgtggcagaagatacaagttatgttttgccgtagccttattttcgtacggcatattacttatcctgtgaccaaaggacattggatggaatatattattacaactagttctatatcgggaggcattatgcagacagtcacccaaaaaacgctgaaagacacgatgtattatggggatatccctgtatttgtctataagatcaactatccttcctttaccaccacatgtgacgaaaccgccggcagggccataaatgcctactatgccaagagggcaatggatacggaggaatattgccggaatatcctatttgcgcaggcagcagaggataaaaggtatcatcaagatgggctgccattcaacagctataccctggaggtggtctatcaaattacttataatgccgggtgcattaccagtttatatacggatacctatacctatatgggaggggcgcatggcgagacaaagcggacatccgacacatgggactttgtgactgggaatcggttaaaactggcagacgcctacccgcttacgcctgcttctctgtaccaactgcacagatcgatagcaaggcaaatcgctaaacggttaagagaaaccccaggctcatattttgaggattacagatctctgttaagggatacttttaatgtgaatagtttttatttacagccgggtagcggagttatctattaccagcagtatgacatagcgccatattccacgggaatcccggaattctattttcctctgcgttaacccctatttttgtgcaatatgtagaaaaataacgacgagccacaaaagttttgaaaatagttgacaacatggctgtcaattcaagaatcaagcatttgggtctgcctgcagtgagaggcgaagaagtgtatatagcaaggatagcggaacatttcctatgacaagaacggaaagaagcgtcctatcaatccgttcttgttggcagacagcgccaatccatacgaggttatgccagttgcaggaatgctgtcaaacccgaaggaatcgtttctttttgtatcttttattccgatttttccaaagttcttaccggcttaccgtatgcgccttcgtatgctctgccccagccggttattacggagaacagcagtaccaggaacaacgagaagcagtaaaacatgaatccgcttacctgggtaacggataaggcatctgcatattcatatccggccgtaagggaagatccgatgaatacgaatacgctcagaaacggaactgccaggacgatggaattggcaaatccatccagcagattggcccggcggtatgggtgcaggccgacgcgtttcccaatctcgttctggatctttccgaaggcagccatggaggcgctggtcacgccgccgaagaacatggttgtgatggagatcccaagcatcatggcaatctctgtaccgcgggtagtctggccaaatttgctgtccaggatcatattggtaatcttctccaaggctccggcagcagtgagtacgcccatgattccatatacggaaagtacaagggtgatggttgcgatcatcccattgataccatcggtgaggaatccggcaggcgcgccgtccttgacggataggatgctgcttgggggcagaaggtggaaagccagtcccacgatggttcccagaatcagtccgacggtaatggctttataaatatttctggtttttacggcggtaaccagcatcaccactacaggaaccagcatgaccagcgtggcagggttcatattttgagtaagtatctcctctgcgccgctgccaagcgttccgccgcctccaaatatccagaacagtacaaaagagatcgcaccggcagttagcgagtatttcaatcggctggtcacgcacccgcctacatccgcgaagccggattttttcgtgtattcttgggtgcccgcagatataatcgtcgtatcagagatgggagccaggttgtcgccaaagattccgccggatacgatggcgcctgccagtgcggacggattgcttcccagcaggatgccggctgcgtagaagatagggaagcaggtgaacatggttcccagggaggagccggtagcggaagctatgatacatacggcaaaaaaggtaaatgccgtaaataagccgccgcccacatgcagtttatcggcgagccatacaaagccggtggaaatattggcagccttgatcatggcagaaaacatgccgatgatcagcagcaggacggtaaccggaatggcctctttcgcgccgtcatagacggcttcccagaagcggtcatagtgtcctttcttagtgaagacggcgctgattagcagtgccacgaaggctcccattgcaagcgcgtacatttcaaatgctttcaatacgataaaatataagatgcagaagaataggaagatgcataccggaaggaatgcaaccatccatccccctctgaattcgagttttttcttttccatatcaggtgtttctcctttgtagtgttaactttgttcctctttcgtgatattcatatgcataatattacggtattttgagcctacggtacgctctaactcaaacggctcgccctgtggagtcggaaattgcttaaggaacgtgcggattgcgtgaatatcgtcctctgccagttcaaacttgaatatctgcgcgttggattctacgtgcctgctgttgcggactcctacgatagcgccggcaacgccgtcctggcttaggatgtacttggttgcgacattggaaatgctggcgtcatatttttccgcaattccctttagaagtacaagcaattcctggtaaccatcccagcccagagaatcttcgatgatctgaaggtattttacttgggaacgggtctcgggctccgcggctttcctgcccatccatttctctgccaggaatccgccggagagggtcccgtagcataatagcttgatatcattttctttgcagtagtccagcattttccgctccgtacggcggtcaaatacggaatactgcgcctgcatggagactaccggaattccggcatccaccagttcttttaaatgtgctgtatcaaagttagtcacgccgatgttgcggattttccccttttcttttaagcgcatcaggtcgcctgcagtctcgatacatcccggcacatcatagtcccaccagtggaactgcaccagatccagggtgtcccggttcaggcgcatcaggctccggtcgatgatcttttcagtaaattcatagtttacctggcttaagtaattaatatccggtacatatttcgtatgtatctggatatcgtcagcggaaaagccatggccgttcttgagttccgttacaaactggccgatgaattcctccgcgcctgtgtagatatccgcacagtcaaacgtcgtaaatccttgctctaccagcatgtgaaacgccttcataacatccttaagatccaggctgccctgcaggctgtggccttttgataactgccagcagccatttaacaccctgctgatcgtataatccttggctaattccattctctgtgtcatttttttccctccatatcgaaacttaattagtcttcatttcccttataaatatcttccacagtacagtcggcgtggctgaatgtccgcttaccgatccgcgtaatcttaaaacgtgcgccgcaattgggatccggacaagcgatcacgctatccgagagcatccagtcattttcatgcagttctctttgcttagccggaagaagcggaagcagggcggcaagggaatacatggaaaatgaggtggtctgcggaaagaccagattttctccgatgaccaggaagtagtccccttccttatggctgcataccatgggcttgtctgaggcgataacctcgacctttaaatcgtacaatgtaaattcatcatgcttcatagataaacatcctttccggcgaaataaaaaaacctgtccttgaatagattcattcaaggacaggtataaaacctgcggtaccaccttgtttggtataaaatataccctctttcacagagtgccatcacactcctgaccctataacgctggtcttgcgtctcagttacttgataaacgttcacttcgccctccgaggcccacttgctgctactgacatctgtccggcttccaccatcccggattcgctgaagaccgtttcacagcctaacttcctcatcttcggttttaatttttaacattatagcaccgcgcaccaggaaatgtcaacaatcgagcagaagcgggccaaggaggagaacctggagaaaatcaggcgggcattaaagtcagacgagactggtcaggttattctggtatctggagagtccgaaaccgggaaaacggttcttgaaattctcaaaaaggtaaataaaagcgtattgctattgtgcgtacaagttggtattatatagttaaatggaaacactaagatttcaggcatttgctgatattcgcgaagattacggtatatgatttatgaggtaactaccaccggtcaagccgatgccgatttaaggggcatatatgagtttattgaatgcatagggcagcttttatatacctgataaggatgcgaggccttccatacaattcataattatattgatacagaacaattttcttattgtttttttaagtattttgttggagtgatttgcttatattttttgaaacatctgataaaataactgctatcattaaaaccgcaatgataagcgacttctgtaatagaaagatcttctgtttctaataaatagcaagccttttcaatacgataatagttgagatagtcgataggcgtacggtgaatgacagtacgaaatatacgacagaaatattttggggacataccggcaattcgggaaagagtatctaaagtaattggttgagagtaattgccttctatgtattctaaaacaggttttaactgttggatttttagatgacggatacgtacgggcgtatctgtcttttttttaaaataaccttcacgaaagagaatgccataaaattggaatagtccaccaagaacactcatttcccaaccagaaaaacggattcgggctgcggagaacagagaatgaagacagactgatagatcagaagataggcaactaaaatgttcgtgtatggagagctgttcatattcggtttttctcagatattgacgcactgcatgggtatgcattaaaagtgtagtaggatcaaacacaagacattcatagatacagttttcaggttcccctccgtgaattacccctcctgcaatataaatcagatccccggcatgagcaaggaattctttgtcattaaggtagattcgcatattacctttacatatatgtagaagttcagtttcttgatgccaatgaaatggcattgtataacggggatgatgttggtcaatatcataataagcgaggggaaagtcgttagttccatgttgtcttttttcattataatccaaatagtgcatgttacctccaaaaagtgaatattatcccattttttgcaattatatcacaggaaataggggaaacgcaaacttataatgtgaatataagaagatttggaggtgcaaatatgggaaaaaacagattgattggcagttatccggttattggaatacgtcccacgattgatggtagaagaggatatctaaatgtgcgtgaaactttagaagaacagacaatgaagatggctcgtgcagcagcagagctctttgaaaacaatctgaaatattctaacggagaggccgtaaagactgtgattgcggatacgactattggtggcgtagctgaggctgccgactgcgcagacaagtttagaaaagagggagtagaaattacactaaccgtcacgccttgttggtgctacggggcagaaaccatggatatggatgcctcaactattaaagcagtttggggattcaacggaacggaacgaccaggcgcggtatatttagcaagtgtattggcaacccatgctcaaaaggggcttccggcctttggaatttacggtcatgatgtacaaaatgctgatgcaaaggagattccagaagatgtcaaagaaaaattgcttcgttttggcagggcggcaatagctgcagctactatgagaggaaaatcttatcttcagataggttctatgtgtatgggaatcggaggatctatcattgatcatgattttatcgaatcatatcttggaatgcgtgtggaatctgttgatgaagttgaaattattcgtcgtatggaagaggggatttatgatgaaaaagaatttctgaaggcactttcctggacaaaaaaacactgcagggaaggttttgataaaaatccactagaaacacaaaaaacaagagaagagaaggatcaagattgggaatttgtagtcaagatgatgtgtattattaaagatctgatgaatggaaacgaaaatcttccgaaaggatgtgaagaagaacagtgtggacataatgcacttgctgcaggattccagggacagagacagtggacagatttttaccccaatgcagattttgcagaagctcttttaaatacttcatttgactggaatggggcaagagagccgtatattttggcaacagaaaatgatgtgctaaacggtttgggtatgatgttcatgaaactccttacaaatcgtgcacagatttttgcggatgtacggacttactggagtcctgaagcagtggaaaaagctacaggatatcagctggaagggaaggcgaaagagtcatcaggatttatacatttgattaattctggtgcagcatgtttggatgccagtggtgcagtaaaggacgaaagtggaaatgctgtaatgaaacagtggtttgatattacagaaaacgatcaggataggatcatggaagctgtgacatggaatccggcggattttggatatttccgtggtgggggatattcttctcgttttttaacggattctgagatgccagtgactattatgcgtcttaacttagtaaagggattagggccaacagtgcagattgcggaaggatggacagtaaatcttccagaaaaagtatcagatattctctggaaacgaacggattacacttggccatgtacctggtttgtaccgagagttacgggagagggagtttttaagactgcctatgatgtaatgaacaattggggagcgaaccatggagccatcagctatggacatataggagcggatttgattaccctttgttccatattacgtattcctgtttccatgcataatgtaccagaagaaaaaatattccgtcctgctgtttggaatgcttttgggatggataaagaaggacaggattatcgggcgtgtgctacatatgggccgttatataagtaaggaagagcggagatggaagaaattatttaagaatgataaggagtggaattatgtatcaagtgactgcaattttaatcggcgcgggacttagaggcgcgaaagcatatgcaacatacgcaaaagaatatcccgccaattttcgtattaaagctgtggcagaacctaatgatgtacgcagagaatcctttgcaaaagagtatgaaatttcggatgaattttgttttaaagattacaaagaagtcctggaacgacctaagtttgcagactgtgttttagtgtgcactcaagatcatgagcactttgaaccggttatgctggcgctccgcaagggataccatgtactgtgcgaaaaaccgatgtcagtagaacgagaagaaatgttgcttatggaaaaagcggctgccgaatatgacagagttctgtcagtatgccatgtcctaagatactctccgttttttaagaagataaagagtctgcttcaagaagagattatcggaaaattgattaacataaggcataccgagaatgttggtttttggcattacgcacatagttttgtaagaggaaactggaggaacaaagaactttcatgtccgattattatggcaaaatgttgccatgatctggatattcttctttggcttgcaggaagccgctgctctaagatacaatcttttggtgatctaacatttttcaggaccgagaatgctccaaatgaggcgccaaagtattgtatggatggatgccctcatatggaatcatgcccctactatgctccgcgattttatttggaacatccaaaagcggttgaagataaattgatctatgcagtaagtgaagagatagattcagacagggtaatggagaaactggcatctggcccttatggaagatgcgtattttactgtgataataatgtatgtgaccatcagattgttaatattgagtttgaaaatggggtacgggcagatttcacgatgtcagctttttcgaaggaatgttttagggagattttgcttatgggaacaaaaggccagatatggggaaacatggaaaaaggagaaattatcgtggatgattttgtctcaggcagccgaaccaatattcaagtacatacacccgaaggagggcacagtggaagcgatactgcaatgatgagagaatttactgctttgatcgctaatgatggaaaagggatcaggacgactgacgtttccgtttcggtagacagtcatcttatggcattggcagcagaagaatcaagacaatatgcaaaaataattgattttagggagtttagaggaaggacttcatgagggtatttagaaattggaaaagatattttgaagcagtaataatcattgtatgtatgataataattggaggatgtagtaaaaaagaagaacaggaatgtgtagagattacccttgtgcatgggtatggaggaacgctggaaagctataagatgatgcaggaaatatacaatggtttttcagagaaaaatccggatattaagctaaactgtattgaatatatgaataatgaaattgcagtagagaaagcaaatgatatgcttgcagtgggagaaattccggatattgtcagtacaaacagtctgtcttattatgtggataatgcgataaaggctggaatggctttaaatttaatgccgtatttagaggcagatcctgaatggaaaagacaaattcatccttctgtatttgaaacatgggaaactgatgatggaaggatatatacgattccagatgctttggaattaagtggatattggtataataaaaagtatttggaagaggcgggggtattggacaaagagggaaatataagtatacccaaaacatgggatgattttatgaatatggtggagaaacttcagaactggattgatcagtcaggacaagatatttcggtattttcacttgaagaagaacaattgacagaatttttatttttagcaaggcttgcaggggatggccaatcggggttggcatcagcacaagatcctgtaaatggaataaataaagaagccgtagaacatgttgttgcagatctggcacgattgaatcagtactcctgtccggtagagaatatagagagtgctcggcagcgatttattgaaggaaagacggtgatttactttaatggagtatgggaatcagaagcgttggaacaaagtaagctaagcgatgattatgattgtgctgcttacccttcaaatgatggacgtagtattagttacgtttcacctccttcggggtatgttttggcaaaacagcaggataaaaagaaagaggaagcgtgtatacgttttcttaagtatatgcttagtgatgaagtgcaaaagagaattgttttagagacaggccaggctccgtgtaaccctaaaataggtatgaatgatcttccgaataatgtgaaacttttaagcaaggcagttgatgcagttaataaaggtgatgaacagataaaaacgattaccagtgcatgggaatatgacaaatggaaggttgtggatgattatttggaacaaagtatgagtaatggttctaagttgaataaaatgttagaagaacttgatgcaaaatagggtgtgagatgaagaaagaggaaaaggataaaaagaaatattctctgcgaatcaggatgttagaaattaatgtggggattgctttggttagtttcctgttatgtggagtattgtttatatgctctgtcagttgggtaataggaaaatatattgaccatgatttggattttttcttgaaagaagcaggagaaaatatagaaaaaagaatggaatatatgacagaagtcctgaatgaattgcgctcctcagaactattaatggagtatttgagagatggagggaatacatacagtttggaaaaagttagacaagcattttcagaggctgtggatatcaataattcgtctaaccgtggggatgaaggaatgccgttggtggattgtgtctatcttttccgaaatagcggcgaatatataacagatttttattacgctatagttccgggggatcaagaaaagagtgatcagatcattgcaaatgtgtggaaggtatatagggatactagggacaatgaaattggctttgaaacttattgctatagagatggaaagagtttatatttagcatgccctattttaaatgattctttggaggagcagggcagtcttgtatttcgattaaatataaagactatatacagtctaatgaatcaagttggtgattacagagggggagtttgcgcaatatatacaaagaaagggaatattctggaaacgtatcctaaaaatgtggatttattagggaaagattggaaagaagtttcacataatactccgtatataggaaagattggagaggagaaatacagattgtataatcatgaactgtgtatggacctccgagttgccatagggataccagagaattatgcaattaagatattgtatgattctatagatatttatgtagtcggaattatagcgatcattatagctgggatacttagttttggagtgtttacaattaagatgacaagtcctattgaagaagtcaatgaaaaattgaagctagttggacagagaaattttcaagcaaaacttccagattatgatagtaaggagtttcatgcaatcagttgtggatttaatcagatgacaaaagaaatagactatctggtaaatgaagtgtatgaaaaacagatactgataaaagaaatggagctgaaatttcttcaaacccaaatgaatcctcattttatgtttaatgtattaaatgcattagcgctacaagcacagatagacgggaatcgggagttaagtaaaaagatatccacattttcacagttgatacaagcaaaaatttatcggagtgatactgagaaagttcagataaaacaagaactagaatatgtcaaatactatttagagattcaggaatttagatatgaaaacaatttaacatatttgattcaaatggaaaaaggagttgaggaatattacatacccaaactatgtattcaattagtggtagaaaatgcaatagtacatggtttggaaccgaaacttggaaaaggaaatgtcgaagtagatataagaaaagaagatgaacatatatgcatttgtgtgaatgataatggaatcggatttgatatggatggagaagttctgctacctttgaaagcaaaagaggcggataaagtgcataatagagtaggacttaataatgtaaacaatattatcaaattaatgtatggaaatgaatttgggatacatattttttctaaaaagggaaaaggagtaagagtaacgatataccttcctactgatattggagaggagatataaaaatggatctgatggagttgtgccatggaataggactaagtgaagaggctgtaaataaaatagatgttataaggcagaaaaataaaatgtatgaagacatgaaacatcttttcaaaaataacagagacgaattttataaaatactgatgtcgaagaacgatacagaactgtcttttctatattattattgccaatttgcttgtgatacttatgaagcatataaaaagagaggaatcgaggataaaattttttgggatacttttcttgatattcggatttggagtgatgattatttccgcaagacagggaagtgtggacttgattattatgtacatgactggttttggcgtgcgttggaactaaaacttttcagacttggaaggctggaatttgaggagatgaaagcagatgaagaaattcagggaacaaatagttgtatcaagaaaggggaatcagtaattagcatacatataccagaaggtgatccgttgactccggaggtatgccaggaagcgctggaaaaagcatatcattggttcggaaaagaaaggcagtatttttgtcattcttggcttttatttccagaacttcggaagttacttcctcaaaaatcgaatattcttctttttcaggatttcttcgatattaaaaaagtggattatagagagcgggaggcagaactgaggatatttggagagactgggttacgggtaatagattatgccgaagagacttcccttcagaaacacgctaaacaattcctgctttcaggtggaagccttgggaatgggtgggggatattaaaaaagtaggaaattattttgattcgttatccgctgacttaaaatcaaaatcatcgtataaatcggaggattcaatatgaactggaaaatagaagataaagaatataaaaaagaaaagatagaatttatcggcaataagatgtgtataggaaacggctattttggatacagaggaaccttggaggagtatggaaaagaacagcttgttgcatgtacggtatcagaaatatttgatgataatggtaacggctggagggaaccagtaaatgtgccaaacggactctacacttgggtagaatatgaggaaaaaaaactttccgtgttagaaacaaaaattgaaaaacacgttcaggaacttcactttgacactggtatacatagaagaaagaccgtgttttcgacagaagatggacaaagaattacggtagaagcagaaagatttgctagtttagaagatattcatcttttggtgatgagatatcaagtgactgcggataaggatttggatataaaaatacatactggaattgatgatgatatatggaacataaatggaaatcattttaaaaacaaagaatatatagaaaaagacggtgttactggaatgatctgtaagacaattgagaataccgcaaatatagcggttgcagaaaaaaaacaggctctgtcgccggaaggaaaaaccgaaaatctcaaaaacggatcggttattcatgttaatttgaaaaaaagtgttccatatgtaatggaaaaatatatagcaatatgtaaagaaacagactgtacagatgtgtgggaagcggctgttaattgttgtcaacaggcagaacagaaagggtatgataggcttaaggcaaagcagaaagcattgtggggtaaaaggtatgaaaaactcggaatcgaaatagaaggcgatgaagaagcagaaaaagcagttctttatagcgcatatcttctttatagttctgcaccagagcatacagacagagtggcgattccagcacgtggactctcggggcaggtatataaaggggcgatgttttgggatacggaaatatatatgttacccatgtttgcattttgtgatccgaagattgcgagaaatctcgtgatgtacagagtgaaaaatttgcagggagcttatgaaaaagcttcggagtatggatatgaaggagcattttatccgtgggagagtcaggaaacaggtagagacggatgtacccactataatctgacggatatattcaccggacgtaaaatgaggacttatttccgtgataagcagatacatatcagtgcggatgtggtatacggactttggaaatacatgaacgtcacaaaagataattctattttgaaggaaggagcagcggaagttatcttggagtgcgcgcgttttttctggtcttatgcgtactataaaaaaggaaaagagcagtatgaattccttgatgtgacaggagcagatgaatatcacgagagagtaaataatgatgcctatacaaattatatgatccgtttaacggctaaggcgacgctggatgtaatcagttatctgaaaagtaaagaaccggaaatgtataagaaggtgatggataagttggattattgggaagaagaagagaatatccgagatctttatgagaaaatctatctgcctaagccaaatgatagtctggtgattgagcagttcgacgggtacttaaaagaagaggatttatctatacaagaactttattcaagaattataaaaccgaacgaatatcttggaagtccatgtggtctggccgtcaatacgcagatcataaaacaagcagatgtaatattgcttttgagtctattaggaagtgattttacagatgaggtgaaagagaaaaactggagttattatgagcctaggacagagcatggctctagtttgagtacctgtatatatgctctgatggctgcgcagataggaaaaacagagtgggcctatcaatatttaatgaaagctgcgcagattgacttgactggagactacaaattatatctgggagacttgtatattggtggtacccatcccgcggcaaatggaggaacatggatggttttgacgcaggggtttgcaggactggaagcagaagaagatggtgtccattttagtccgcatttgcctgaaaagtggagaaaattaaagtttcgattcaactatggcggaagcagatatcgtgtggaaatcacgaaagatatattgaaaataataggtgaagacgcagcaaaagaactccgggtgacatatatgggaaatatatatacatgctctgccggaagtacattaaaaatacagatggagaatcgggagggaaaataaatgcagtataaagccattttttttgattgggatggaacagcggtaaaaagtagaaaagaacccgtggattcagtcgtagaactgatgaaaaaattactttctaaagatgtgaagatgattattatcagtggaacaacatatgacaagatagcagatggaaaactacacgaatattttacaaagcaggaacttggcaatctttatcttggattgggacgtggcgctcataattattcatttaaagaaggaaagccactgttgcataaggaatttctcccgtcacaagaagaaaaattaaaaattcatgggagtgtatttttactgcatcaacatctattgcgagagtatgggttagattcggacattgtttttacgagaccaaattactgcaaattggatttgatggtaaaccatgatcgtagtgataatttattccttcaggaaggtgaaactgaaatgcttcaagatattttgcataagcatggtataagagaagggcttatagagcttatgaagttggcagaagattttggaaagaaaaatgggataacaattaaagcgactacggacgcaaagtacttggaggcaggtttgacgaccaaaagtgataatgtggattactttgtggagaatgtattaaaacctgaaaacatcaatatgaaagaatgttgtttctggggagacgaattcatatatctggataaagggattcccggaagtgatgcttatatgattacagaaaaaactagaattgctgaattttacgatgtctcagaaatagatgcagaaagaccggaggaggtgaaaagattaggtggtggcacaatgcagtttcatctgtttttgaaacaacagtttgaaagataataggaatggcatttatgaaggtttcacatttttgacctgtcagtcttttttgagacgacaggtcaaaaaaatgtaattaaatacatagaaatcaacaaaactgacaaaaaaatataaggaaataaatggttctgtttatttaatgtgcacagatatagagatatactaaatctacaatagaattataagaaatggatcaaggaggaactggaatgaaaaagaaaaaactgattagcttgcttctggctgcaacatgcatcggctcaatggcacttacgggatgtggagaaaaagaaaaaggtggaggaaaggaagcagataatgaacttccgacagttacatttacacatggatattatcaggatgaaaccgaatgggctccagcggcagagatgagaaagatttatgaagagtttgcggaaatgcacaaagatgaatttaattttgtaattaaagcagaccagagtggggcagagggaatttacaatactgcactcaatgatttaagtgcaggagagttttatgatattgcggatttcggcggatgggatattacagatgctgctgcgagtgcagatatgattatggatttaaaaccctacttggataaagatgaagatctgaaagctggtgtgggtgtatgttatgatcagaacctgacggaagatggaaagatttatacagtgagagaacagattgaaggagtaggattctggtataatcaagcgctgtttgataaagccggagctacaacacctgacaaatggacatcatgggcagattttgatgaagcagtagacaaattatcagatgctggaatttcaccatttagtcttaatgcgggatggccaacaaacattctggcagcaggttattcacagcgggatgaagattcaagaaagttctatgcaaacggtggttctgcgaagagttttgatgatcctacctttattggtacaatggatttcttacaaaataatgttcttcaaaaaattgatgctgcacattttggacctggaggagatgatgacaaccaatatacagaagactttataagtggtgattccgcaatgcttttcaacggcgtatgggcaacgggggattttgcagattgtgaagcaggaatcgagaatatcaaacctgctgtattcccgacaaacgatggaaaaacagctgggcttctttcaggaggctgtggttatgttgtgtcagataaactgactgacgagcagaaaaagatttgtattgaatttatcaaatatatgacaagtcctgagatcgcagcaagaattgttgaaaatggaatcggaatggttccaagtacagcacttgattatgataaagcagcggcagaagtagagagtccggaaggaaaacttcttgttcaggcttgccagacactacaaaatgcagatgttcaggtgcttggctggggaaatacctttggtgatatggaaggcgagattcagaataaatatgcaggacttaaagatggttccaagacagcggaagatgtagcagcagaattggatcaggtacttgcggctgagtaaactgacgtctacgacgaaccagtgaaaaaatgcgcgaatgggtaaaatgtgtaagaatcggggactgtcttagatagtccccgattttatgaaagaaaggatagatatgaatagaaataggagaaagttaagtaagcgtagtatatttatcattgtgttcctgcttccagcagtcatcctgttcggaataatttatgcatatccacttttgaatatctttgctacgtcattttgcgagtggaattcgaagaattttgtggctccggaatttcttgggtggaagcaaatgtttgataattatatcaagatgttcacgatggataaaaatttccagatggcgttattgaattctttaaaatgggtagcattgactcttataatacaggtaccttgggcagtagtagtttctctagtgttgtcgaaaaaagagagaggctggagatttacacgaaatatgtttgtaataccaaacattatttcaacagcagcaattgggttaatttttttaaatttatatagtccgtcaagaggagtaattacagagatatgtaattggtttatgccaggaagcgatgtaagtgtattagcagacgaaaaatgggctttttggggagtgacatttgcgtttatactatttggaggatcttcttgtttactattgcttacacagatattttctattgatacggcaatctatgaagcggcaaaggtggacggggcaagcggactacagattgatctgaaaattactcttccattactcaaaccaatgattggtacagtagcggtgattgcagctaactatggacttttactctataatgaaattgcattaattagtggaggcgggccggataacgcaacatatagcttgagttattatgtttataaaacagcgctcggaagtgagaggctaaattttgcaagaggaaatgcagcaggtgtgatccagatacttcttggtattttattggtgggtacgattaataagatgttccatagcagaaaggaggaactgtaatgagaaaaaagcaaaaagaacatgcagaaagcggaagtataggagcaaaaatatttcgatatgcaattatggcaatcgttctgtttatttcgctttatccgattttgtgggtgttgatttcttctttcaaagaaaagccaggtggtttgggattgccggaaaaatgggtgtttgatggatatattactatttttacaaaactggatatccaaacgtatttcttgaacagtattattataacctgtgtttctacattgttgagtgtaacaattgtggctatggcagcgtatgtagttgccaggatgaattttaaaggcaaaggattgataacactaatgttttcaacgactctatttattcctgctatttctatttcttttcctatttatcgtttgttaggagagcttggtttaagggatacgaggattggagtcatttttatctattcaggtctgggtattgcagtaacgtattttattcttcagagttatttcatgtccataccaaaagaaatggaagaagcagccagggtggatggatgtggatattttgggacttttttcagaatcattctccctattgcaaaaccgggacttgcaacagcggcaatcatggcctttttgaataactggaatgaatattattttgcatcattgttactgaaatctccagagaaaatgacaataccagcactgttgggacagtttacatcagcgtattcaagaaatttaaatggtatgttctccgcaattattgttgcagttgtgccgacgattatcgtattctgcctattgtcagagacatttgtgagatcgttgactgcaggcgctgttaaaggataaaaagtggttgatgaaaaatggaggataaaagaaaggagcagctccaaatgggaattatagaagagagagaaaaaagggtacaatggtttatggatgcacgctttggaatgtttattcactggggactgtatgcaattccaggtcgtggcgaatgggtgatgggagatgaagaaattgacaccccggtgtatgaaaaatattttgaagagtggaatccagatcactataatccgaaacaatgggcgaaagcagctaaaaatgcaggtatgaagtatgctgtgctcacgacaaaacatcatgaaggattttgcctatttgatagcaaatatacggattacaaaagcacaaatacaaaatgcggacgggatttagtgcgcgaatatgtggatgctttccgtgcggaaggtctgaagataggtttttactactctctgcttgattggcatcatcctgattatccggcgtatggggatatgtatcatccgaatcgcaataacgaagcggtaaagaatgagaaaagagattttaacaaatatttaaattatatgcatgctcaagtgagggaattacttaccaattatgggaaaatcgatttattgtggtttgacttttcttacgaaggccatatgggggaagactggagaggaacggaacttgtcaatatggtcagagaattacagccggacattattatgaacggacgtttggaagctaatggggaatcatacggctccgtgatgacagatgaaccaaatattttttctggtgattttgcatgcccggagatgattattccaatgaaaggattaaggactccatctgggaaaaagattccatgggaggcatgcttcaccatgaataataattggggatatactccgatggatcttcatcgaaagactgcttcacagattattcgaaaactagtggaatgtacgagtaaaaatgggaacatgattctaaacgtctcacctactccgaaaggagaaatccctaaatggcagctagatattttggcagaagtgggagaatggatgcgtgagaatggggagagtatctatggctgtgggatgtcagaatttgaaaaaccagagtggggacgatatactcagaagggaaataaactctatgcacatgttctggatgaatgtgtaggagcgctcccgcttcccggagtaaaagggagagtccagaaggcacgaagactttgtgacggaagcgaaatgctgctgctgactccttgggtagcaaaagaatttccggggtatgagtttgtaaattatggaaatccggaatactattcgtttcatattgacgagacagcggacaacgtaattgaattgactttaaaagaaaaaaccgaggtgttataatggtcgttagacaagactgaggtgataggcgatggtatataaggtattgatagcagatgatgagccaattgtccgtaaggcaatgcaaacgctgatagaatgggaaaagttggaatgcgaccttattggatttgcagcaaatgggcaagaagttatggaaatgctgggacgagcaataccagacattctgattttggatgttcaaatgccaggagtaagtggtattgaattagcaaaatatgtctgggaaaaaaaactttcttgtaaagtaatcttacttactgcttatgcagatttttcttatgctcagtcagctgtaaaatatgatgtaattgattatgttattaaaacgggagcctttgacgatctggtcgtagctatagaaaaagcaaaagataagattaaattaacggaattcgaacgaaatgtcgagagcaaaaaagtactgaaagaaaactttttcaaatctgtttttgacggttcgctttatttgcaggaagatatcagaaaaaaagctgataaagcagatatcagccttgtagagggctatctggttatagtttgtcattttcgtgcaagagaagacaaagaaagaagttatacatatagtagtctgcaaaacttttttcacatggtgtttgatgaaaagttggtatatagtctggcagtagataaagacgtaatggcaattattcttgatcatatttcaatggatttttatgaagatatacataagaaatgtgaggaagttattgagatcatggataactttatgaaaatgtatgtctatatgggaatcagtaatctgggaaatgatatattcgaactgaaacaaaggtatgaagaagcagaatctgctgaaggcgaaagtttctttaatgataagagtaagattaattattttcaagagcgtaaaaaagataccaaagaacttttagaacatattgaaaaaggtgtggaaagtcttcaatattggatgaaaaaaggaaattctgaggaggcaatgaaagaatttgacaatattattaaatatcagatggaaagtgggggatctgtagcaacgattctagaagttggtatttgtatttatgcgtcgagtaaaaaaatgctatcagatatggaaaaaactttgtatgatattacattgcagaaagagagtttttcaaaaagtatttaccgttgtaggcatatcagtgaatattatagtattatgagaaccgtgattgaaagtactgcagaatacatcaaaatagcggcaagcagaaggaatattcttatttatgagtgtgaaaaatatattgatgagaattatgaaagaggcattacagtatcggaaatttcaaggtatattggagtaagtatgagttatcttagccgaatttttaaggatgagacaggtaacacgattattaattatattaatgagaaaaagatacagaaggcaaaagagtatctgggaggaacggatatgaaaatatatgaaatagccgaaaaattaggatttgagaatacaacatatttttcatatttctttaaaaaatatacaggaatatcaccaaaggaatataaaacccctgaagattcaaattaatccggaaactgtctgaatgtaatcagcacgaggacgcaggaacttgcaaagatatgccatgatattaaggatcatattttttatgattaactttctggcagaaaaagacgacatacagggtataaaaaatagttagggaaaattccggttgtggaaggtacggcaatgattacgttcccgcagagggagtggcttggggcacttatttattcaaaagcagagaaggcaaagaaagcaggagtagaacttgattttgaaaattgttggagtccggaaagaacctatttaccgtataccgacgatatgttggatatttttgttttaattgctgaaaatgtgtgataaaataaagaaaatggtgaaaattgacaaataacaggaagtaagtaaatatgaacgatccatacattgcacatttttataaagacagtaataatgctatacacatacaatccgtttccgagcacaatcttaatgtggcttatcttgccatgagtaattccccattgaaatgtctatcctctgtcgcctgggttagtggtgcgcttcatgacgctggaaaatatagagaaggtgtccaaaattatctcagaagagcgatgaatgaagaacaagtgcgtcgcggggaagaagaccactcgacaggcggcggttttctgatagataagatgtttcccgccacaaatctatctgtgctgatacagatggcagtattttgccatcatggtctgcatgactgtttttcattcgaaaaatccactatttacattaaagagcgattgtccaaaaaagagaatttccaaaatgtagaggaacgttattatcaatatttaaaaaaggaagatttggagaagagaggccttatagcaaaacaggaagtagcaggcattatccaggagatattagggtttattcgtattaagaatttgagcaaaaatatgtatggaaacagagatttttttctgggtatgtatgaaaggacaattatgtcgctgctggtagatgcagataggactgatacggcatgctttatggagcagagagaattgcctgctcctaaaagtgatgaaatgatgcaagatatttggggaaaatgtattacatatctggaacagtatttaaagtccatgaaatcagaatcaaggctggatgaatatcgcagggatatctcgcggaaatgtatggaggccggagaaagagaagaaagactttaccgtctgacagtgcccaccggagcgggtaagacgcttagtagtctgcgttttgggctgtatcatgccaggaaatatcataagagacatatcatatatgtagcgccctatcagagtataatagaccagaatgcggaagaaatacgcagggcgattcataatgatgagattgttctagagcaccattgtaatgtgattcatgatgatgaaagagagagaatccgctatgaaattctgacagagaattgggattcgccgattatagtcactacagcggtacaatttttgaacacgttgtttgcctctggaattggaaatatcaggcgtatgtatagcattctgaatagtgtgattatatttgatgaagttcaagccttgccagtaaaaattaccaaactgtttaatctttctgtgaactttctgacggcatttgggaagtcgacagtggttttatgttcagcgacacaaccgttatttgatgagctggatgaaaataggctgctgccgccactatctatggcaggtaatcccaaagaatatgctgaggtatttaaaagaacgaaaattatagatgctacgaaaggagcaggaagcggatttgaggcagaagaattacaagagtttatctgggacaaggcggagacgcttaaacaagttcttgtcgttgtgaatacaaagaaatgtgcagagagtctttataaagagattaagaaaaaatgtaagggatcggattatatattatttcatctgagcacgaatatgtgcgcggaacacaggagggatgtactaaagagactggaagagaatttagaaaatgagaagaaggtgatatgtatcagcactcagctgattgaggcgggagtgaatctatccttcaagtgcgtcatacgttccctggcaggccttgacaatatcattcaggcggcaggccgatgcaacaggcatggggaagcgggtatggggtacgtctatgttgtgggaataagcagcgagttagaaaatgtagaaagacttgcagagattcgaaaaatgcaggagagcatgacagaagtgctaaatcaattcaggaagaatccggaaatatttgatcatagtctgtcgtccgaggagtcaatccggtactattaccagatatatctaaggaagagaatgccggagatggaatatcttgtatcggtgaatggagtggatgttacactgcttgacttgctatccactagcaagacgatgtgggaaagcatgtcagagtcaaccaaaaaggatagtaagaatttgctgttaaagcaggcgtttaaaacggcgggagatgtattcgaagtgatacccgaagatggaaaggtagatgtcgtagttagatatgatgaaaaagcagagaagcagatagccattcttgaggacgaatatgctacgctggcagagcataagaaagcgcttcgaaggcttcagccatatacggtggggatatccgagcaatttcgtcagaagttaggaaatgcaattacatcggtatgtggaggaaccgtctatgtcctgagtcagaactattatagtagagaaactggtgtttcagaagaaccgctgggaatggaatttataaacttttagaaaaggggtgagaaggtgaagtatcgcaatacagtagaatttgaagtgtatggagactacgcgttgttttcggatcccgtgacccgcgtaggaggggagaaatgttcttatcatgtgcccacgtatgaagcgcttaaagggattttgcaaagcgtgtactggaagcctacgttgatttggattatagatgcggtaaggattatgaagccaatccagacggagacaaaggctatccgtcccattagttataatgggggaaatgatttatcctattatacttatttgaaggatgtcagttatcaagtgcgggcacattttgaatggaacagaaacaggccggaactagaatcggaccgtaatgaaaataagcatcataatattgccaggcgaatgataagccgaggcggaagaagggatattttcctgggcacaagagaatgtcagggatatgtggtaccatgcgagtttgaagaaggggaaggatattatgacagccaggaaggcgatttgtcctatgggcttatgtatcatggcattacttatgcggatgaggcagttcttccggaagatgagggaaagatgacggtgaggttctggcatccggtcatgaaaaagggaatcatcgaatttacccgtcctgaggagtgtgcggaaaaaagacacattagggaaatggcagtaaagccatttggagagggcaattttacaggcattcgagaatttgacggggaggaggaagacattgagttggtttagcgaattgtatgatttatatgagaaaaatgaagagaaaattggaagagtagaatataagacccgccaggggaaaaagggaccagagcaggttccgctggttcttttgccaatatttcatacgacggtagcagcacagattacggttgacattgacagtgagggaaatattctcggagcatcaagagtgccggatgaagataagatgacaatcatccctgtgacggagacttctggcatccgcacatcaggtgttgaggcgcatcctttctgtgacaacctaaaatacctggctgcagattacgcaagatatgtaaagaatgaaaaaaaagacttttccaagaatcacaaactctacatagaaggtctaaagtcctggcatctgtctgagtatacacatccaaaagtagatgcgctttatgcttatttaagcaaggggacgctcatggctgatttggttgaagaaggagtcttgattacagatgaaaaaggagttcttttagaaaaggaaaagatacagattgtatcacaggcagatgcgtttgtaagatttcgtatcatagaaaaagcagatttaagccaggatattttaaacgatccttccgggcgatatttttcagaatgttggctggatgggaccttgcagaaaagttatatcaagtatcaccgttccagattaacgcagacagatttctgctatcttactggcgagaatgttccggtatcttatcttcagcctaagaaaatcagaaatgaaggagacggggcgaaacttatttcctcaaatgatgaggacaattatacatttaaaggaagatttacggataaaacggaagcatttgctataggatatgaggcttctcaaaaggcccacaatgcgcttaaatggattatacgtaagcaaggatacagttgggatgacctttgcatcgtgatctgggaatctaatctggagccgattccggattggggcgctgatacagataagattgaggaagcctatcaggaggcgcaggaaagcgaatatgaaggatggggagaggaggaagaacaggaagaaaaggaatatgagacgggagccgcggctgcggcaaggttcaaagcagcaatgcgcggatatggagagaatctgaagacggactcgaaagttatgattcttgcctttgatgctgccactactggaaggcttgctatggtggaaaataaagagtttgccgccagcaggtatgtagataatatcaaatactggcatgacagctgcagatggctgcagtcaaaatataaggacggacataactttcgttatttcggaatggcaggcgtgaaagatattgcggaagccctgtacgggacggagcagaaaggaattatttcccttggaggcaatacaagaatgtatgcggaagtatgcaagaggcttttgccctgtatatctgagaggagacgcgtgccgagagatatagtaaatgccgcggtacaaaaagcgtcatccccggtttcgtatgacaatcggtataattgggaaaaagtgctttctatagcatgcgctctggtgaaaaagcagaaaatggaagtcgaaaaggaggagtggaaagtgtcgctgaatgaggaaagcaggaatagagactatctgtacggacgacttttagcaatggctgacaggattgaataccgtacatttgacagagatgaagacgggaaaagagtgacgaatgcaaaaagatatatgaatgcatttgcacagcatccataccagacatggaaggtattagaggagcgtatacagccctatttgcaaaaattagatattaaggagcggaattcttataataagactcttgatgaaatctatgaattgttcgatgaaaaagaatttactaataatgacaggctggaaggattatatttactgggctatcacagccagtcttatgaactaaaatataggccgaaaaaagcggaggaggaaaaagaatgacaactttaaaaggaaaaattgattttgcattgcttgtttcagcaacaaatgctaatccgaatggagatcctttgaatggaaatcgtccaagagagaattatgaaggctatggggaaatctcagatgtctgtattaaaagaaagatccgtaatcgtttccaggatatgggacagaaaatatttgtccaatcggatgaccgttccgacgatggttacacaagcctgaaggaacgggcagaaggatgtgaagaattaaataatgaaattaagaagaagaaaaaagccgatagggaacgttttgcccagattgcatgtcaggaatggctggatgtgaggacgttcggacaagtattcgcgttcaaaggagaggaagtttctgtgggaatacgaggacctgtttcaatccatcaggcagtcagtttgtcaccagtggatgttgtcagcatgcagatcacgaagagcgtcaacagcgaggcaggaaaggacagtaaggcttcagataccatgggaaccaagcatagagtagagtttggactatacctggtaaaaggaagcgtgaatgtccaattggcggagaaaaccggattttctcaagaagatgctgaacttttaaaggaggcgctgaggaccctgtttgaaaacgacgcatcatccgcaaggccggaaggaagtatggaagtctgccgactctactggtggcagcatgaggaaaagactccttcagtatctactgcccaaattcatagaagtataaaaattgaggcattggaggacaggcctaaatcatttaaagattactctatcaagttggaagaactgaactgtgtaaaaccggaggtatatgagtttgtataaagaagaggattacctgcaattgtcgggtatccagcattttgcattctgccgccgccaatgggcgcttgcctacatagaactccaatgggatgaaaatgtgaggactgttgaaggaaaacttttacatgagaaggcacatgatcctacaaacgcggagaagagaggagatctgattatcagcagaggcatgccagtatattccagagaattggggatcagcggtgaatgtgacgttgttgaattccaccgctctcaggacggaataaccttatttggacgggatggcctgtatgaagtaattcccatcgaatacaagcggggaaagcccaaggaaaatgatgtggatattcttcagcttatggcgcaggcattatgcttggaagaaatgctttgctgccagatttcctttggatacttatactatggagagacaagacatagaaaaatagtagaatttacagaagaaattcggcacaagacaaaagacatgtttctggaaatgcatcagtattatgaacgaagatatactccaagggtaaaacgttccaaggcatgtaatgcgtgttctctaaaggatatctgtctgccggctttaggaatagcaaagtcggcaacagattatattaatagcaggctatcggaggaatagagttgaaaaaattaatgaatacgttatatgtgacctctgcgaatcggtatctttctttagatggagagaatgttgttattctggaagaacagaaggaaatcgggcgcgtgcccctacataacctggagggaatcgttacatttggatatacaggagcaagcccgagacttatgggaacttgcgcgcagaagaatattagccttacttttatgactgagcacggacgtttccttgcacgggtatgtggagaagtcaggggtaatgtcacactgcgcaggcagcaatatcgtatcgccgataatacggaaaaaaggatagaagtggcgcgaaattgtattgttggaaaagtctataattcccggtggattttagagcgggcaatccgagattatccgctgcggctggatgtagaaaagataaaagaaaaatcgtctttccttgcttcccgcttaaaagaaatccgtacgtgtgaaagcccggacaaacttctagggcttgagggagagtccgcctccgtttatttctctgtctttgatgaattgatcttgcagcaaaaggaaactttttattttcatggacgaaatagaaggccccctttggataatgtaaatgcaatgctttcattcgcctattcgcttttggcaggtatatgtacgtctgccttggaaactgttggccttgatccgtatgttggcttctttcatacggatagaccaggccgcgcatcattggcgctggatatcatggaagaactaagaagtgtaatggctgaccgtttcgtactaacgctgattaataaaaggattgttgattccagcggattccttcagaaagaaaatggtgctgtcattatggacgatgatacgagaaagaaatttctcgctgcatggcaggataagaagaaggaagtcattacacatcctttcctgggtgaaaagatggagtgggggatggtaccgcatgttcaggcaatgcttctggccagatatattcgtggagatctggaagagtatccgccattcttatggaagtaggtgatagaatgctggtgttaataacttatgatgtgaatacagagacagaggcaggaaagagacgtctaagaaaagtagcaaagcaatgcgttaattatggacagcgggttcaaaattccgtgttcgagtgcaatctggacgccgcaaaacttcgccaggtaaaggctatcttggaagacataattgataaagaggttgatagtttaagattttataatctaggtaataagtataaagacaagattgaacatataggagcaaagaaaagttttgatgtgactgcccctcttatattctagagtggtttagtgcgaatgtgaagtgcacatgaaaatgcagggagattcgcacctggatattgatgatatgagggctagggaagttataatttgttgtgtaggtgttggaaaaagttcttttgtttggcgttttgcataagagattggctgtatattaggggttttatgtgcaaaattgctgcctctccctgtatagggagagtggattgaaattttcagattcatagatacaattacaaggtctgtagcctctccctgtatagggagagtggattgaaatatcacccggtatcctgttcttaccccattattcgcctctccctgtatagggagagtggattgaaatatacaaacctcaattctcatttgcaaacgctcttgagcctctccctgtatagggagagtggattgaaatatacaccgtcttacgcaatttattatggtgctttgcctctccctgtatagggagagtggattgaaatatctgcgccctaagttgctctagtccggcggctaccgcctctccctgtatagggagagtggattgaaatctcaagccattagatgtcgcatactccttatcatcgcctctccctgtatagggagagtggattgaaatgaatacgtttacaacatcttcagcggcttctttcagcctctccctgtatagggagagtggattgaaatcctaatattagcatcattgtatatctgctcggaaagcctctccctgtatagggagagtggattgaaattttgatgtggcttatctttcacgaattcatgcgagcctctccctgtatagggagagtggattgaaatatcgaaccgaagagtataccggaaagatctacggaggcctctccctgtatagggagagtggattgaaatattcttgcatcctttcccgtccatcgggttgaagcgcctctccctgtatagggagagtggattgaaatacattttctcagatctgtgcgaccaatggaattagcctctccctgtatagggagagtggattgaaatttcttctccgaatatttctctgaattttcttaaagcgtctctccctgtatagggagagtggattgaaataatttcgcttgatttttctgagcatgaatccatgtctctccctgtatagggagagtggattgaaatacttgaatttgcttaaagcagtttgggcctcggtgtctctccctgtatagggagagtggattgaaatgaaaagaaggaggtggagaaggatgccaagagtagtctctccctgtatagggagagtggattgaaatagaatttgcaaaaaaatagcgcaaccccttgaagtctctccctgtatagggagagtggattgaaattatctcctttctatcgcccgaaggcctctctaatgtctctccctgtatagggagagtggattgaaatacggcacattggatgaattccgggacaaggtacgagtctctccctgtatagggagagtggattgaaatattgaattgattgggttaggcacttcccagccaaggtctctccctgtatagggagagtggattgaaatactcttcttgtctgctttgcggatggggcctgtagtctctccctgtatagggagagtggattgaaattccgattcacccttgcactgtcccttaagtcaccgtctctccctgtatagggagagtggattgaaatcaccattccggtagttatcggagatattacaatcagtctctccctgtatagggagagtggattgaaatccgaataccccgaaacctattacctccccttccccgtctctccctgtatagggagagtggattgaaatagttaatatggctggaacattatagccagcctctacgtctctccctgtatagggagagtggattgaaatctcctgtagccttgctgcatagtctgatagatcccgtctctccctgtatagggagagtggattgaaatttgcaatttcaatggcttgttctttcgtgtatttgtctctccctgtatagggagagtggattgaaatatcattttgacctcctaaatgccagttaccatagtctctccctgtatagggagagtggattgaaataaagagtagagaggggcgttttggtatgaaaatagaaataggcaaagaatttccacagtattttaagccctcatatccagaggaatttaaattattttcacactttgaaacgacagcaggaataccaactgttttgtttgcaatcacgacttggaaagagaatggtaagccgaatgtgtgctttcattcgtggagctgctttcacggagataaaaccgctttctttgccgtgctggggaacttatatcagcatacccacacctatgccaatatccaaagagaaaaatgcttttgtataaacttccttcctataagtttctacgacaagctggtaaacaccattcgccaaaatgaaatggacgatgacgaatttgcggcaggagggtttacagcttcttatgccaaaacaattcacgcccctgtaatcaatgaggcgtttcttagtatggaatgtaccctgaaagaagtacaggatttaagcggtgcgggaattacagctatggtgatcgggcgggtgcagcatatttccgtggaggaagcctatgcccaagggtatgaactaagatatggtaaagatggatttatgatgttaattcctgcgccgcaagaccttgttaccggagagccgaacaagtcggcgattgcgacagtggatatcgaaaaatacgactgatttgaagagggtgtgaaaatgacgacttcaaatataaaggcgttgattccaagtgaacttcgcaaagtgtgggagtttattttggacatcgagaattacgacgcttggagaagtgatctgagtaaaacagaagttgtaagtgataagcaattcattgaatataccaaagacggttatcctacgacttttaccgtgacgcttgttgagccatacagacgatgggaatttgatatgcaaaacagcaatatgagtggtcattggattggcgtttttacggataaaggcaatgaaacggagatagattttacagagtgcgtggaagcaaaaaagatgctgatgaaaccctttgtgaaatcatacctgaaaaaacagcaggcacagtttgttgcggatataatgaaaaacttttcttaaaaactcatacatagcaaggcggtttcttatgaagaagtatgaatatatgacagttgatttaagtgcagagccatcggttaatgttcacattaagttggaacggtatattgaaaaacttaatgaatatggaaaacagggctggcgtttgatttctggaacagatgactggaagtattcatttttgagcgtgaaattgatgatgaaaaataacatgcaggaggcgtataacctatgaaagatatgatcggatactgtgggctggactgcgaaaaatgtgacgcataccttgcgacaattaacaacgatcaagccttgcgtgagaaaacagcgaagctgtgggcagagttgaacaacgccactattatgcctgaacatattaactgcgagggctgccgtatgaacggggcgaaaacggtattttgcgatagtctatgcgaaattcggaaatgtgctttggaaaaaggcgtttccacctgcggcgactgctctgaggtggaaacctgttcaactgtcggggcgattatttcaaataatcctgccgctttggaaaatttgaaagaacgaacactttaaaattagactgcaatgaaaacgattttgattcacggttcagggcataatgcgacaagttggaaggaaacagtttctaatgtaaaaacagcactgatataatatgcccgaatttatcttccattcttaacagcaaagagacaaactacgcaaatttatattcttcctttgtggaatattgcggcaaaattgacggacaaattcatttatgtggtatttctttaggtggcataatcggactaaattatgctttggattttccggaaaaagtaaaaacattggttttgattggtacttttacagatttatttaattttgcacaccattattttcattttgacacggggatttttgcggttttacacaccagttatataggcttgacacgtaacgcttttaagtattgttacgtgtccatcttaaaaatgttacgtgttagttccattgtgttagttccatttcccccacagatatgttactataaccatacatgattcctgcttacggcacacagcacaacaggcaggtgagatcgaggtgattggattgcgttacggagcagtagttacggtggcggagatttcttctcagatgggcgagtttaagccgatgctgccaatcgggaaggaaacgatgatacagcgggtcgtgcggacgcttaggaaagcagatgtagaagatgtggttgttattacggggtatcgtcatgaggtaatcgaagagaatttaaatgatgcgggcgttatgtttttgaaaaacgaacgctttatccagggagactggattgactcggtaaagatggggatggaatggcttgatgataagtgcgataagatattggccataccaggggatattcccatggtaatggagaacacgataagggaacttcttgcaaaggagggggaattcgcatacccgacattccagggtgagtctggatatcccatcgtattaggtagtcaggcggcggctgggataacaaatgccatatcaacagaagaatatcaagccaagccaaatgccatagagcatctgttggagataacgaagggcttgggtatccaggatacgaaactggcagtagaagatgtgggagtaacacttcagatcaattcgcagaaggactatgaaaaggcgctgaaactttatctggacgaggcagggcgtaatgaccaggtgcgagttattaccaagacgatgcttgctacggatgagaaattttttggaaatggaacggaacagcttctggaattgattggggtcacaggttctgtgaatgcagcctgccaggccatgaagatgtcttataccaaggcctggaagatgattaaccgcattgaaaagaagttaggctaccgggtgatggaacgggttgcgggaggccgggaaggcggaggttctcaacttacggaagagggcgaaagactgctgcgggcatatcagaagatgagggcagaagtgcaggctgcggcggaaataagttttcagaaatatgtatcgggcatcctgggataggctagaagtttgaggagacataaaaggctatgaaagagggggatggaatcgttgagaaaattattttctttactaaaggatatgctgcaaagcggccaggatgctgtactggtatctgtggtggcaagtttgggctccgcgccccggggcgcgggggcacatatgctggttgcaagagaagggcgtatcagagggacggtaggcggcggcgcggtagagcatgagtgtattcagcgagccttggaagtgcttgacagcaagaactcccatttggaagaattcaggcttcatccgaatccggcagcggatcttggcatggtttgcggaggagatataagcgttttttttaggtacataccatcgggtgatgaacagatgatagatctgtccatcaaagccatccggatgtttgaccaggatcgaaagtgctggctggcaatagatcttacaaaagaagggaacgggcagatgtatctctatgaagaaggggaactgccaaaagaagtgcaaactgccacgcgtgccaaagcaaggtcagaaccacaggacagtcctgcgaaatactatctggaaaaattagtgcaaggcagcaaagtttatattttcggcggcggccatgtggcccaggaggcggttcctacgcttgcaagagtcaatttcgactgtattgtactggaagacagggaagactttacaaagccggaattatttccgggagtgagaaggacgcggctggtagatatggagcatctggaagaagtatgcagggatatcacatccgatgactacatctgtgtcatgaccagaggccatcagcatgactttctggtagaaaagcagattttgcgcacgcctgtatcttatatcggagtgattggaagcagaaaaaagaaggaggtggtctttgcaaaactccgccaggaggggtatacagaccaggatctggcaaggatcaagacgccgatggggctggatatccaggcggagacgccggcggaaatagccgtcagcattgcggcggagatgattatggaaagagcacgccgcaatcgtgttgctgcggaccaaatgaaatagaacgaactatactaaggagggaaagagccatgcgtctgatcaagacggaggaagcggctggccatgtgctttgccatgatatcacgcagatcatcaagggagtgaccaaggatgccgtattcagaaaaggccatatcgtcagagaagaggatatcccagtacttctttccgtgggaaaagagaatctttatgtctgggagaagcaggaaggtatcctgcatgagaatgaggctgcacagattttgtgccggatgtgcaggggggacaatatgcacccgacggaagtcaaggagggtaagattgaactgatcgcggactgcgacggcgtattaaagattgatgtggagaagatgaatgcggtaaactgtctgggagagatgatgattgccagccgccacggcaactttccggtaaagaaaggcgacaagattgcaggaaccaggatcatcccgctggtaatcgaagaagagaagatgagtcgggcagaggccctgacacagggagagcctattttccagatcgtgacttaccaaaagaagcgctctggcgttatcactaccggaagcgaagtatataagcaccgtattgtggataatttcaccccggttatcgaagataagttaaaggaatatggcgtggagatggaagactatgcgatctgcgatgacaagccggaaatgattacagatgctatacataagatgctcgataaaggaatggacatgatcatctgcacaggaggcatgagcgtggatccggatgaccgtacgccgctggcaattaagaacgtggcggaggacatcgtgacttatggcgcgccggttcttccgggggcaatgttcatgctggcttattacgatggagacattcccatcatgggactgccgggctgcgtcatgtacgcgaaaaggaccatatttgacctggtccttccaagagtgctgtgcaacgagaagttaaaagcagaggatctgtacaggctcgggcaaggaggcttatgcttgtcttgtcctacatgtacgtttccaaactgtgggttcgggaaaggagcatgatgatgaaggatcagtatggcagggagatcgattacctgcggatatctgttaccgaccgctgaaatttccggtgcacctactgaatgccagaagaaggagtcgtaccactgtgccacgaggatatcctgactttcgacgagattataagaatctgccgagcaggagtggaactgggcattcgcagaattaagattaccggcggagagccgctggtacgaaaggggatctttgacttgctggagcagatgcgccgtattgaaggggctgagaaactgacgattaccaccaacggcgcattgcttgaagaggccttgccgtggcttgaagcagtttaggtagacgggatcaacatcagcctggatacgctaaaggaagcccatttcttggaactgaccaggagagatgcgtttgacagggggatgcgaggtctaaaagcagcggtcccttcgtcaataaccaatataaacatcgagttgatgcccattggcttggaaaatggcagggaaagccttagccagtgcataatggagaacgcgctgcgggccagaggtactcagaagaagaatgcaggcaactggcaccgccaggccagccttccgcattggaaatataataaagaaaaggagaaagttctatgaaaaagaaagcagtggcagtatttatggcagcagtgatggtagtggtgcttgcgggctgtggaagcaacaatgcaaaggagacaggagacagggataagaaggcctcagaggaatctaagaaggatgacgcagatgagacggagatccaggtgtttatcgcggcaagcctgaataccgtcatgacggaaatcgcggaaaagtataataaaaacaatccgaatgtgaagattaccttcaatgcggatagttccggcaccctgctgacacagatcgaggaagggtatgaatgtgatattttcttctcggctgcccagaagcagatggaccaattggaccaggatggactggtcaaagaaggaacccgcgcaaatgtggtgaataaccaggtggtgcttgtgacccggaaggacagtggaaccaaggtaaccggacttgagaatctgaaggatgcccagagcatcgcgctggcaggcggaagcgtcccggtaggcaaatacaccaggcaggcgcttgtgaatctgggaatcctgggaaagacggacgagcccgatgcagtcactacggaacaagtatcagaagcgcttggcggcgtggagatcagcgagcaggataatgtaagcaaggttctggcagcagtggtggaaggctcctgcgaggtgggcaccacgtattattccgatacctatggttatgaggatgagctgaatatactggagatggtaggttacgatctgacaggaaacgtgatttatccgatctgcctggtagataatcaagaagcggatgatacccagaccaaggccgcaaaagatttttatgattatgtgttatctgagcatgccagcgagatattttccaattactattttgatactgatgtgcacagatagacaagaggaaagaaggaggaagcatctatggaggaaataggcgcagtcctgcagggcttggactggagcccgctttacatctcgctgaagacaggagcggtggcaaccataatctcctttttcctggggttattcgcggccaggaaggtaatcaaggcgggcccgaaagtaaaggccgtggcggatgggctgcttacgcttcccatggtgctgccgcctacagtggcgggcttcttccttcttctcctgttcagcagaagaaggccgcttggcatcttcctgtatgatcaattagacatcaaagtagtacaaagctggcttggatgcattattgcggcgacggtgatcgcattcccgctgatgtaccgaaatgccagggcggcgtttgagcagatcgatgtaaatctggtctatgcgggacggactctggggatgagcgagggcaagatcttctggaaagtagtgattcctacggcagggcccgggattatctcgggaaccatcctgacatttgcaagagcactgggagagtacggagccacttccatgcttgccggaaacattcccggtaagacagggaccatttctcagaagattgccatggttatccaggatggcgattatctgacggccggagtttgggtgattatcgtgctcatcatcgcatttacggtcatcttcctgatgaatcttttcactggcaggaacatgaagaacgtcaagcgctggtagaaatacggacagagggagaagagcagtggcaatcgaagttaggattaagaagaagctggggaattttcaactggatattgattttaaaacggatgagaaccggatcggcattctgggagcctcaggctgcggaaagagcatgactttgaaatgcatcgcgggcatcgagacgccggatgaggggcggattattgtggatggaacgttgctgtatgattcggcgaaaaagatcagcctgaagcctcagaagagacatatcggctacctcttccagaattatgccctgttccctaccatgacggtggaggagaatatagcggcaggactgcaaggagggaaagaggagaaaaggagaagggtcgtagagatgatggaaaagttccaactgctgggacttggaaagcagctgccgggagaactctctggcggacagcagcaaagggtagccttggcaagaatcatggcctatgagccggaagtcatcctgctggacgagccgttctccgcgctggatgacttcttgaaagacaggcttgcgcaggagatgctggatctgctgaaagattaccggggaacggtcgttctcgtatcccacagacgggacgaaatctatcggtttaccagggaacttctgaccatggcagatgggatgcagatcagctacggaggcacccgggagatctttgcgaacccagggaggaaggagacagcacgtctgaccgggtgtaagaacattgcagaggcgaaaaggatagacggccgccatcttgaagtgccggaatgggggattactttgtgcttgaatgaaaacatcccggaaaaggtggcgttcgtcggggttcgggcccatgaatttatccctgtctggggagatgcaggaagcaactgtattcctgtgaacgttaaaagcagtgcgatcctgccttttgaaagaaagtatttcctggcgggcgcagagggaagcgaggaggatatctgctggtttctgcaaagggataaatggcctttgatcgacaggaagggaatgccggacttccttatgatgccggaggagaagatcttactgctggaatagcgataccatttcttttttttcatggctgtggtagaatacgactaatggaacatgatggctggaggaagtatatgaataataaagagatgataaaatatttttacgagacggtagttaccgaaaatctgttggatgaagtatgccgcttcgtatcaccggactgcgtgcttaagataggggaagacgacatacctctgggggatgacgggatgaagacgcatttgatagaagtgaaaaagacgtatcctgattattctatgaagatccttcgccagttttgcgaaggagactatgtaatctcggaatttataatggaaggcacccatatgggcgagtggctgggcatgaagcctacgaataaaaggctgcgctttacaggcgtggatattgataaagtcgttaacgggaagatggttgagcatggaggcgcggtcaatacatttgagacgctctttgaagaacatatgataaagctggtataataagcggatggctcctgtcatagcgatgcaaaaggaggaacaacggtggtagaattaaacgaagaagcaaaagaatacatgcaaaggttcggatggaagcatgtggtacttaatattgagactataaccacctgatgcgcgcctccatataaggagatgtcggtaagttttaccgatgcggatgaagaggcgatgctggagaaggggtatgagacagaccaaagcgagttgggaaacgtatattacccaaaggagggaatagaaatcccggatcatattatcgtaaagtatgtagaatatccctgggtcacctgcttcgaggtggaagggatagaaatcatcaaagaggcaatgcaaaaggatattgaggaatagacaagcctgagagcaggccaagcggctatgtcaaaatgggtattaggagtttcccaaacaaaaggatattaagaaacaactcatgtttatctgtttgcgaagaaataattgattataaataagagatattgcttaaataaggtggtatctcttttataacaaaaacctgatgtaacgacttataaagtgaaataaaacgctatggaaaaatgacacttgaaatagagtgtcttttttattgctgtgaaacagcatagtatttcatttctgcttgtttgttatcaacgttttatctcattgcttgtcaagaacttgttgaaaagcaatgctttagcactctttacaagctgtgcgataagacgtattttcaaaatagcagaaattgaatatagaataagactgaaaaaagaaaatatttagtactgaagtattttacttttatggtaaggtgctttttttatttatgatacttctcatatatccatatcaaaaggaggattgatagaaaatggcacaaatttatggatatgtacgagtttcaagcatagaccagaatgaagaacgacagattgttgaattatcaaaaagaaacgtactttctagaaatatttacatagataaacagtctggaaaaagttttgagcgtccgcaatataaaaaactcatcaaaaaattaaaacacggcgatttactttatattctaagtattgaccgtctaggcagaaattatcttgaaatacaggaacaatggagaatgcttactaaagaaaaaggagttgatatttgtgtaatagatatgcccttactggacacaagaaacggaaaagatttgatgggaacgttcattgctgaccttgtgttacagatattatcgtttgtggcacaaaatgaacgtgaaaacatcagaaaaaggcaggcacagggtattgctgtcgcaaaggcaaaaggcataaaattcggcagaccagaaatcgcactcccggaaaactttggagaacttgtccatgactgggaaaagaaaaaaatccctctgccggaagttttggaattatgcaaaatgagtaaagcaacattttataggaaattaagagaatatcgtctgctggaacaaaaatagtctgcgatgaactatcaaaatgtacactttttaatagtccactatatcattatacagtataaacgaaatttccaattatttcaatattttctagtgttcagaacagttttgaagccattattttttaattgcgattggctgttttaactaatctatatctttttcaaaaagtgtacattttgataatggtaagaaaaggagggaggaacagaaactttttaatcgttctctataatattttgaaaaagtgagaggagaacaagaaatgaaaagaacaaaaaaagcatttgtactcgttttatctttgtccatgttggcttctataagtccacaaactgttcttgccagcggcggtaatacagaccgctatgaagaagtacatggtacacaggctatcgttaaagatgcagaagttcatgtatatactacaaaaaatggcggaacagtgcaattaacaggtagcaacgggatcgaaacgacatttacgcaaggaattggttatagagaatacaaggcaactcctgcggacggctggagatggaaaggctggacttatgaacagttatatcaaggggaagatttaggcaaccgtacagactatggttggggaaggcgatattctttctcaaatgatggctctgattggaaaagtccgtacgatggcataggacagactatctctgtcaatcgtctgcttactacaggcgaaacggtaggaaataaaatcacatacaatctttatgcggattttaatcctacaatcaacgctactgccgatacaggcggaacgattgaagatagtggcattacagaggtggaatatggcacaaacaagcaatataccgttactgctgatacaggaaaagatatagcttcggttacagtggacggtaatagtgttttagcagaaacaaagaaagactcatttacctatacttttgaaaatgtaacagaacctcatactattcatgcaactttcactgacgagatccatactgtttcttatgaatttgtcagcggaacagctaacgaagcacttccagaagaggtaagtaacttatgccctagcagttctacatatacctatggaacagaggtaactccaactcaaccaacctcaacatcagtaaaagtatctgatggtgtatggacattcaaaggctatgataaggaaaatcaaacagtgacaagcgatgtaaagtttaccggaacatggacatttgcaaaaaatgcagtaacaatcaaccatattccaacgattacagcaggggataagacaattacagttggggatagctttgaccctaagaaagacgtaacagccagcgacaaggaagatggcagtctcacagataggatcgaagttatcaacaatactgtaaatacatcaaaggtcggcacttatacagttacttacaaggtgacagataaggacggagcctctgtaacaaagagcattacagttacggtcaaagagaaagacaaagaagaacagactactgttccgacgaagccagataacggtaacagcacgtcaacagatactaagaaagatgccagtaagacaggacagaccgtaaagacgggagatacatcaaatgttttgttatggagtacgattgcaatactttcacttgctggagtggttacagttctgtttattaaaagaagaaaaagccactcataaatcggctataaacattgatacacaatcaagaaatataaaatctgatttttggaggttattatgaagaaaccaaataaatttatcattgctatggccgtaagcactctctgcctgccagctttcgcactccctgttcacgcaatggattggagagatggagcacaggcttcgcaaacatttacttatacggaaacagcagagggaattaagtctgtttatgttcaggacaagaacggtactgtcagcaccgaaattaaaccgaatacgtctgtaaagagtaaaacaggaacaatcacatggagagatagttatgaaaatgttacttctttctatgtagatgttatggctggttatgatgtcaaggttttagtaaatggacaagacggagaactattcgatacttccgcagctattgatgtaaaagtaaattctgatttaggaaaggacaatacttatacggtaggaacaaaagacggctatgaaaaagtgttctatttttccagtgctggaaaggaagcttgggttaaaaatccgaacatctcttttgaaacagaaaaaatttcctattcgttgactaacaacgagggcgctgttttaggtactgctgctattggcgatgttcctacgattgatgaatctaagtttatgcagacaggaaaaacaattacagggtacacgatcaacaatgtatcatggacagaaggaaaccctattacagaacaaatgattgaaaatgcgtctgcatatgacggcaatttaatggtagaagcccaatatacagtcaactcacatcaggttacaataaattattatgatggtggtatggttagtggaaatccgagcaaaacaacaacagttaactatgagtatgcttttaaattaaataaagaaagtttacagcttgaagaaaatcagtatattgcaggagcaaatgaagttgttatgccagacaaggatataacaatcaatatcgtaagcagaccaacacaagtatcctataaagagtgggcatttacctatgtaggaaacaacgaccctcatgtacagggagttacagtacaatggaataaggacaatagttccgataaatcattcagtttaaatgaaactgcaacgctggctacaccaggaacggcaacaaaatgtattaaattctttgtgatgatagacaaagaatatgagccgacaggaaaactttcaggcggaagtgatataacttttaacaaattgagtgatttggataacggaacactgtatgaaatggaatttaaaagacgtgcagaccatacaatagacaaaaatccagctcatgaaacatttactattgaaacagtgtcatcggtacaataattttgtctgacatatttaacagatacacctctcataaggacagagccgaaaggtttctgtccttttctctgccataagagagaacgggacataaggcagagtagaaaacaaccgatggagtgaacaattcacggtggtagtcgtaagacatatcgccacgccagcttgctggcaaggaaaggaaaatatcctcaaacgtgattttgcagcggatgccatcaatcagaagtggtgtatggacatcacctacatttacgtgccgaaagaagggtggacatatctggcctccgttatggatttgtacaaatgtcaaaaatacagaagggattatcctacattcagatttaggcagccaatataccagtaacctatttgagggatatttggcttgaaagggaattctccattcctttagccgcaagggtaatccctatgataatgcctgtatcgagccttttcattctgtattaaagaaagaggaagtccattgtcgcgcttatcaggattataaggaagcaagcagggcaatctttaagtacatagaatcatggtataaccgaaaaaggatttacagtgccattgattatatgactccacagcaaaaggaggatgaagaattaaaaaagtggtatagactttcaaatttttttgtccaaggtattgacataggttcaacaccgtacagttactattcttgtagtttctacggacagtttggcaaaagatattggagcgattgcagtattgggcaaaggcagtacagcagggcgaagaaaaggtcttgaataaaatataaaaagcaggcaatgcggagcgaatacgagggaacaggatatgataggtgctgaaaagtggattgagttaatcaaggagtattccgtaccaaaggaactgacagcaccattattaaatgcaatgatagaaaaagtccttattcatgaagcaaaaacgaatgaggacaatgaaagaatacaagaaatcgagatatattaccgttttattggaaaagtagactaataaatatggttcatatctttaactaagggaaagcggcgagaaccctccgaaacgtaatttccggaagtttttttgacgtccttataatggctgccaagccatctggtacaggatcagtaggaaataaacccccaatggggttacttctgggggagagggatgctataataatcataaagcagagatattagggcagcccaagaggctgcctgaggccgggagaatgtgtctcaagaattcagtcggatatctttaatatcctgctgtgcgagacggataaccgacagattgaatatggactgataccgccggatgaatttattccgttcgagcaggtgtgccgcctcttaaggaactggcaggacagccgtaagagggtgcttccaatctctgtcaacctttcccggatgcatctgggagaggccgggtttagccaaagaactgcatatgaaaacggtggcggaaggcattgataccagcagccttgtgaacttcctgaaagaagaaggctgcgacatggtgcagggatatgtgttctacaagcctatgccagcccgggaatttgaatacgagatactggagaaagaaagtgggacggttgtatgaaacgcaagatagatatgagtgaaatatcagatggaaaattatatacggcaaatgacatggtaagggcagactgccatgactgcgaggggtgttccgcctgctgtaaagggatggggaattcgattcttttagatccgctggatgtatggcggctgtgcacgggactttcgctggactttgacggtctgatgaagagatgcctggaactgcacgtggtggatggaatgatacttcccaacttgagaatggatagggaaggcgaaacgtgcacgtttctggatgaacagggaagatgcgcagtccacccataccggccgggcatatgcaggctgtttccattgggaagatattatgaggaagagggcttcaagtattttctgcaggttcatgagtgcaggaagacggaccggggcaagatcaaggtgaagaaatgggtggatgcgccggatctgaaggcttatgaaaagtatatctttagctggcatgattttttaagaaagtgcgaagaaggattaaacggacttgatgaagagcagacaaggattctcaacctgtatgtcttaaagaccttttatcagaccgcatatccaaaaaacccgcaggcacaggcattttacgaggagtatagccgcaggcttgcgcaggcgaaggagacgctgggaatggaggtgtccgcatgtatatagcagatctgcatattcactcccgctattcccgggccaccagcaaggactgtaccccggagcatctggatcttggggcaaggcgcaaaggaatccaccttgtggggaccggggactttacccaccccgcttggagggaagaactcaaggaaaaacttgtgccggctgaagacgggctctatgtattaaaggaggagtaccggattcaggacgaaacctgtacagataggataattccccgattcgtgattaccggagagatcagttccatctataaaaagaacggaagagtgaggaaggtacacagcctgattctgcttcctggccttgaggaggcggaggtgatatccaggaagttggaggccatcggaaatatccattctgatggaaggccgatcctagggctggactgccgcgacctgctggagatcgtgctggaactctgccccgaggcaatctttgtcccggcccatatctggacgcctcatttctcattgtttggcgcgttctccggatttgatacggtggaagaatgcttcggggatttgtcgccccatattcatgccatggagaccggactttcttcggatccgcccatgaattggcgggtatccgccctggattcctatcatctgatctccaattcggacgcccattctccagcgaaactgggaagggaggccaaccttctggatatcgagttgtcctatcaaggtctctatgatgcgatccagaaaggccagggactgactggcaccatagaattctttccggaagaggggaagtatcattttgacggacatcggaaatgcaacctttgcctgagtcctctggacacggagaaatatcagggaatctgccccgtgtgcggcagaaagattaccatcggcgtatcccaccgggtagagcaactggcggaccgggcggaaggctatgtaagagcggatgccaggccattcgagagtctggtgcctttgccggaagtcatcggtgcttcggtagggcactcggcagccagcgccagggtgcagaaggaatatcagaacatgctgcgacgcctggggtcagaattcgatatcttaagaaccatgcctttggaggaaatacgcagcgtgtcgggatatttgatatccgagggaatcggaaggctgcgggatggaaaggtagagaggattccggggtttgacggggagtatgggactataaaattatttgctccttcagaaatagaaaataccagcggccagatggacttcttcgatctgctgggaggaaagaaagaaggcgatggaaaaagcgccaaagcaaaagacagggtaaatgcagccatagaagatggaataacttccgcgaaagcgaagcagccagaagaagacggcaaggagcaaggctcaggtaccaaattgccgctgtctgacaggctcaaccgcgagcaggagagggcagtacggtctacagccaggacggtagccgtaatcgcggggccaggcacgggaaagaccaagaccttgatcagccatatcctgtatctgatagaaaatagaaaagtaaagcccggggagattacagcggttacatttaccaatcaggcggcgtcccagatgagggagaggctcaggaatgccctgggaaagaagaagcagatccatacgatgcagatcggaaccttccacgccatctgcctggcatttctgaaagaccagggcagggaattttctatcttggatgaagaaggggcacaggagatagcgcgcgggctcattgaggaataccggctaaaggacacggtgaagaagttcttatgcagggtgtctgcctggaaggcagaaggagaattgccacaggaggacacagacgcgttcctcgcctatcagaaatatctggaagacaggcagcttcttgattttgacgaccttctgctggagacattaaagatgatagaagaaccacaggcttctgcgggatgggagaagcgtttctcctatcttctggcggatgagttccaggacatcaatcctttgcagtaccgcttgcttaaggcatggaataaaaagggccgcgagttgttcgtgatcggtgacccggatcagtccatctatggattccgaggagcagatgccagatgctttgaccggcttgtcgaggaacatgagagtacggaggtggtaaggcttgtagagaattaccgttccacgcctcagatcctgaatgccgctctcgcagtgatctcccataatcccggagaagacagaagacttgctgccaaccgggaggaaggcgatagggcgcgcttggtgacggcagagtcggggatgggggaagccatctttattgccaaggagatcaaccgcctggccggaggaatcggaatgctggaagcccatgagttatccggcgccgtcaggacagaaggccgagtccggggatttgacgagattgccatattgtaccgaaccaactatcaggcagatctgctggagaaatgcctgaagaaggaagggattccctatattgtggcaggaagaggatcatttctgcaggaagaaaaagtacggggaagcatctgcttcttccgttatcttgacaatcccatggatatcctggcgaaggagcagtgccttagacttctgtggaatatggatggcaatctggctgcggaagaagtactggaaaggatggcgggcaagtatcgtcctttataccagaagaaaaagacacagaagttcctggaactgtggatggaggaactgcagctggaagataatgaggcagtgaagaagctggtgggcatgggcgtattttataagacgatgccggaattcatgttggcggtccaattaggcatagaaagcgatattaagcggtgcgggaaccggaactacgcttcgggcgcggtcaccttgatgacgcttcacggcgcgaagggactggaattcccggttacctttatctatggggcaaggaaggggctgattcccctggaaagtgaaaaagggacaacggatctggaagaggaacgcaggcttctgtatgtaggcatgacaagggcgatggaggaattgattctaacgacgtcaaaagaggcatccggttttctggaagggatgccgccagaactgatggagagagaaacggcacacaaaaggagggtagaacagtgccatcagatgagtttgtttgaactgtaaatgtaacgacttggactatgtttcacacagagaatggaggaattcgtatgagtgaagaacaggtaaaaaggatgcatgatggcaaaggattcatagcggctctggaccagagcggcggcagcacgccaaaggcccttaaaaattacgggatcggcgaagaacggtatcagtcggaagaagagatgtttgacatgatccatcagaagcgtacaaggattatctgattgaaaagggcattcttccgattctgaaggtcgataaaggacttgccgccgaggtggacggggtgcgccttatgaagccaatcaatggactggatgctctccttgagcgggcaaaggagcgccatatattcggaacgaagatgcgttccgtcatcagcagttataatgagaagggaatccatgagattgtcaagcagcagttcgcctacggcatccagatagcaaaggcgggattcgtgccgattctggagccggaggtagacatccacagccaggagaaggggaagatcgagtcgttcctgaaagcagagatagataggtatctggccgatctggatgatggcatccggatcatgttcaaactgaccattcccgatgaagccggcctgtacgacagcattgcctcagacacccatgtagtccgggtggtcgcgctttccggcgggtacagccgtgaggaagccaatgagaagcttgcgcagaatcaccatatgattgccagtttctccagagcgctgacggagggacttactgactcccagacggatgacgagttcaacgagatgctgagggaatctatccaggcaatctatgatgcttccatggcataggaaaagcatcttgcaaggacaaggcctgtatagtataattaacgaaggaacaacaggggtgctcgcgtaagcgggctgagagtaagctgtatcgctttaacccataacctgatttggataatgccaacgtagggagatatagaagtaaagtgtaggattttactgctgtaatgctatctgcgttacagcagtttttagtttaaagaattcctgcagaatctcttctgccagcattcatccatctgtcattcaagaacaaaacgaaagggtggtaaaagaatgagaaactatgcaacacagatggaggcggcacgaaaaggaatcgtgaccaaggaactggagacggtagcgaaaaaggagcggatgacggtggaggaactgatgcctctggtagcgtccgggaaagtggcaatctgcgctaacaagaatcacgcatgtatcgacccggagggcgtaggttccatgctgaagaccaaaatcaatgtgaacctgggcgtttccagagactgcaaggactacaatgtggagatggagaaggtcatggaggcagtcaacatgggagcccatgcgattatggacctgtcttcccatggggatacggtaccgttcaggcgcaagcttactcatgagtgtccggctatgattggcacggttccggtgtatgattccgtcatccattaccagagggatctggacacgctgactgccagggattttatagacgtgatccgactgcacgcgcaagacggcgtggattttgtgactttgcactgcggaatcaccaggaagaccatcgagcaggtgaagaagcataagcgtaagatgaacatcgtatcccgaggcggctcccttgtatttgcgtggatgtgcatgaccggggaagagaatccgttctatgagtattatgatgagatcctggatatctgccgtgaatacgatgtgaccatatccctgggagacgcctgcaggcccggatgccttgcagacgctacggatgtgtgccagatcgaggaactggtgcggctgggagaactgacgaaacgcgcgtgggaaaaggatgtccaggtcatggtggaagggccgggacatatgcccatggatcagattgccgcgaatatgaaggtacagcagtctatctgccagggggcccccttctatgtgctgggacctctggttacggacattgcgccgggctatgaccatatcacttccgcgatcgggggagccatcgccgccgcttccggcgctgcattcctgtgctacgtaacgccggcggagcacctggcccttccgaatgtagaggatgtaaagcaggggatcattgcctccaagattgcggcccatgcggcagatatcgcaaaaggcgtacggggcgcaagagaaatcgatgaccagatggcggacgcgagaaaagcccttgactgggaggcgcagtgggcctgctccattgacccggagacggccaaaagaatccgggaagagcgcaagccggagcacgaggatacttgttccatgtgcggaaagttctgtgcggtgcgcagcatgaataaggcgctggcaggagaacatatagacattttgtaaaaaatattgtcattagagcgggaggtatcatatgggagaattatcaaaactgccgaatatcggccccaaggtagaggaacagcttcaggaagtaggaatcacgacttatgagcagttgaaagagatggggagccagcaggcgtggcttaagatcaaggcgattgatgattccgcctgcatgcaccgcctgctcgcgctggaaggcgcaattcaaggcatcagaaaaagcgaattgtctgtagagaagagagcggaactaaaggagttctataatgccgccaacttgacgttccgatcgaaaaaagatagtatgtaatcagcaaagataaaaacacaacgtatgcttatgcatacagtccggttggtagtccgggcgcggcactgtgctatttgcgcgggctgtcagtaaccttcctccttaggtcgtccattcttttgcttatgttttcattaaggaggaaaagaacatggacaaagtattggtaacactgacggtattttttgaagatcctttttgggtcggcgtggtggagaggatcgcagaaggaagtctttcggcttcgaagattacattcggagtagagccgaaggattatgaggtctgggatatcctgctacgcggttatgacaggttacgctttagtccggctgttgaaacggctgtaaaagaggcgaaagtgaatccaaagcgcaggcagaaagaggcccgcaggcagacggaggccgccgggatcggaacaaaatcccagcaggcgctgaaattacagctggaagagaggaagacggagcgcaaaagcagaagccgggagaaaagagaggcggagcagctgcgcaagtttgaattgaggcagcagaagaaaaaggagaagcacaggggccactaggctcccgtgcttttgctggtcagaagtaccaaaggagacgaaaaatgctcattatcatatcaccggcaaagaaaatgaatgtcaatacagatgtattcccctgccaggaactcccggctttccttgacaagacccaggaattgttagattatatgcagtcattggattatagtcaatgcaagacgatctggaaatgcaatgacaagatcgcggaactgaattaccggcgttttagcaagatggatttggaaaaatcgttgacgccagccatcctgtcttacgaaggcatccagtatcagtatatggctccggcggttatggaggaagaagcatttgcctatcttcaggagcaccttcgcatattatccggattctatggaatcttaaagccgtttgacggcgtcgtgccctatcggctggagatgcaggccaagatggggaatcatagacagcgcccttcgcttggctcgctgtatgaattctggggcagcgcattggcagatgcgttatttgaagaggatcaattcattctgaatcttgcctcaaaggaatacagcaaatgcatatccagatatctgcggcaggatatccggtttattacctgtgtcttcgcagaggtgatcggtgataaggtggttgagaagggaacactggcgaagatggcccgtggagagatggtccgctatctggcaaagaaccaagtagaagacatggaaggaatcaagggcttcaaccggctgggttaccatttttcacaggaatattctgatgtggatacgctggtatttatcttgaaacaagacagagatgccgaggcgcattaaaaaggaactaggcggcatacggatatgataaacagcaagcaggacatgcagcgtccacgctgaagtattggcttctgccctctgattccgcgaatccgattagattgtcgatgggcatgatatctgcctacggctcgtcagtatgcgttcagtccaaagattcatagatggcgtcaagccctgtgatcccatactcgttcaagaggcttcggatgccatcctggatctcggcccgggagtagtcggctgcagtcaggaaatcatccgagtattcattgatgtgggaatagaaggcaaggcccagcatcagatattccttatcctcagggtcaagatcttcgtacatcatattttccgcgctgttgatctttccggcatctgcaagggcgatgagacgggcaaaatgatcattgccggtcatattccctgtgaaattagcaaagtcatactgaaactgctgcctgccggtgatcagctgcatcaggaaccgtacgacatcctgaatcatacgcataatataatcttgctcaaaatccatagaatcacctcgatccttgcttattcatcttcatcttcatattcctgatccagcttcgcctgccttttcttcgtatattccccgatagccgcaagggtcgcgaacatcaggataaatatagagattgcaaagatcagggctgcatagccagcgtgcgggatgtcccggtatataagggaagccaggaacatcaggccgaatatgagggttcctatcaagcttgacagcagatagttcttaagaccgggcttagagctatagttccataatcctctcttcatacatccggccaggattgtgacgcagcctgccagaaaggcgacattttccccgatcaacgctctaaaaggtacttggaaaaataatgttttagccgaaatatcggccgcaagggcaaagaacagcacgtagaagcctgcccgttctatttttaataattctaattcctgtcgttcatcaactattttcttcatattcatcctcctcccagaataggtcgtctaatgttacatgcagaaccttgcagatggcaatgcataattttaatgatggattgaatttccccgcctctatcatgccgattgtctgacgcgttacgtctactttggcggcaagcatctcttgggacatatcgaggcttaggcgggccatcttcatttttttattcttcatcctttcccatgcctcctcttgactatagaataatcggttccttaaagaatgtcaattatattttacatattggtgaatatattttgcaatagtacattaaggaaaaaagaggtataatagaaattaatctacttaagaaagaaggaaaatattatgaagaagagaaggctggccgcatggctgatggtgctgtgtctctgcgcggcggcgcttggaggatgcggtgcaaaggaagaggacaagaaggcagatacggccaaagaagagcaggccaagaaagatgataaagcgaaatcccagactccgatcaaggtaggggcgcttaagggaccaacggctatgggaatggcgcagatgctggacgataaccagtatgagttcacgatctcggtatccccggatgagatcgtgccgatgatagtccagggacaagtggatattgccgcggttccagcgaatctggcagccgtcctgtaccagaagacgcagaagcaggtaaacgtgctggcagtcaatacattaggcattctctatctggtggaaaatgggaatagcatccagtcggtggaagacttgaagggaaagacgatctatgcaagcggaaaaggggcgacgccggagtacgctcttaactccgtgcttaccgcgcatggcatcgatcctctaagcgatgtaaccattgagtacaagtccgagcacgcggaggtggttgcggctctggcggcagacccgacggcagtaggacttctgccccagccattcgtgactacggcggtgatgaagaacgaccaactaagggttgccctggatctgaacgaactgtgggaaagcggaacggaagatggaagccgcctggtgacaggcgttgcggtcgttcgcaagggattcctggaagagcatccaaaggaagtgaaggcatttatggatgcctaccggaagtcagtggattttgtcaatgaggatacccaggcagcggcagagatcatcggaaaccatgatatcatagccaaagaagtagcagtaaaggcaattccagagtgcagcatcgtattcgtggaaggcaaagagatgaagaccatgctctccggatatttgaataccttgcttgggcagaatccggagaccgtcggaggtgcagtaccggatgatgacttctattatgcaagataagaagaacatacattccagaaattccaggataaccgtccggatcatggcggtggctttctggctgctggtttggcagattggcagcatgtggctgggccaggagattctcctggcctcgcctgtatccgtggtccggaagttatccgacctgctggtgacgcaagaattctggaagtccgtctggttcagttttggaaggattataggaggattcttaagcgctctggcgatcgggacccttctggcaatcctgtcttatcgctttgggtgggtgaagatcctgttccatccgctggtaaccgccgtgaaatctacaccggtagcatcgttcatcatcttatgcctgatatggataccctccaggaatctggcggtatttatctcgttcttgatcgtctttcctgtgatttatgcaaatctgctggaaggactccagaggacggacgaacaactgctggaaatggccgatgtattttccattgggaaggtaaagcgggcgctgtatatctatctgccccaggtgctgccttatctgctgactgcctgcagccttggcctcggactttgctggaaggccgggacggcagcggaagtgattggcgtgccggaaggctctattggagagaaactgtaccacgccaagatctacctgaatacgccggatctgtttgcctggaccctggtaatcattacgatcagcttcttgtttgaaaagtgcttcctgtggggattgggcagaatcatccagtggatagagaggacatagaatgatggatattattgtagacaatgtaagcaagtcttacggagagcaggtggttcttaagaagctgacagtcctattcccggaggaaaagatctcctgcatcatgggcccgtccgggtgcggaaagactacgcttatgcggattcttcttggattggaacgtgcggatgaagggcgggtagaaggcgtaccttacggaaagataagcgccgtattccaggaagacaggctatgcgagaatgtaagtgccatccggaatctgaaacttgtgtcagagaaagacgaagcggaactacgccgcgagatggaggcgctgcggcttggggaagcatttggaaagcctgtgcgggaactgagcggagggatgaagcgcagggtagcgatcctgcgggcgctactggcgccgtgcggctgcatcatgatggatgagccgttaaaggggctggatgaagagacgaagatcgttactgcaggctatatccgtaagaatgcaaaagaaaagaccctgatcgtcatcacgcatgacaggcaggatctggaacttctgggggcagacaaattgctgactcttgcgtagggaggaagaaaaagaggagttaaaggcaagcggatttaaaagcattccggcggaagcgggcgaactgtacgtgccggaaagaggcgtctcggtatccgagaataataagcccatagaaaggaggaaatttatggaagattataaatggaaaacagcggtcattaccttaagcgacaagggctacaggggagaaagagaggataaaagcggtccgctgatctgcgagatgctgccggaagattcctacagtatcgaggagacattgctgctcccggatgagcaggagatgatcgagaaggaactgatccgtctgtgcgacgatgcccatatggatctgatactcactacggggggaaccggatttgcccagcgggactgtacgccggaagctaccttgcatgtggctacgaggaatgcgcagggaattgccgatgccatgcgctactgctcccttcaagtcactccgcgcgccatgctaagccggggcgtatcggtgatccggggaaagacgctgatcatcaatcttccgggcagcacgaaggctgtcagggaaaatctctcattcatcctgtcctctttggagcacgggcttggcatccttacaggaagggatggagaatgcggaggtgcatagaatgaatgcaggaagaataagcaggattcaggtatttgaagcgaagaatatgccgggaaggcaggaagccgctgtgcgtgtcgtcagaaacggcgggatcgaaggagaccggcattgtatggatcaggaaaagcagatcagcattatgtgggaagatgccagccgctttgtagaagaggaagagataaaaggactatgcttttccaggattaaggcgaatctgatgatcgagggccggatgaggcttgaagtgggtgacaagatccgcgcaggcagcgccctgcttctgattactgataggaaagggacttgctttgacgaatgcgggcggtacaagacaggaatggattgtatgctgaaggactgctgctggttcgccacagcgcttgaggacggggagatccgtgcgggcgacttgctgactaagacaggaagccaggaatatgactggcagcgctatgaaaggcagatgatggttccggggatgggaagagaggcccaggagaggcttgagaaggcgtccgtcctggtggtgggagccggcgggcttggatgcccggtactgaccacgctggcggaggctggcgtggggcggatcggaatcatggacggggacgtggtggaacggtcgaatctgaaccgtcagtatctgtacaccccttccgatatcggaaagaagaaggcggtctgcgccggagcatggcttaagcggttccggccggatatcgaacttgaggcatgggaggaacggctgacccgggagaatgggaaaagaatcgtatcttcgtttgacctggtcatctgcgcggtggataaggtcaagacccgcctgctgatcaaccggctggcaaaagaagccgggaagcccctgattgacggagccatcgacggacactatgggacggtgaccgccgtgaccggaaggcaggatccctgcctggcctgtatgaatccggaggggaaagaaccggtacatataagcagttccctgggaaccaccacgatgatcgtcggagcgttggaggcccagcttgcggtggcatatctggctggtcagaagcgcaagggaggcagcgtgctaagttacgatggaatctatggaaccgtggaggaaatcccggtatttaagaatccctcatgtccaatatgcggaggagatgactgttaatttgataaataattaacatgattggacgggcagatgaaataattaatgataatttatggaaatttgtggtattatcagttattttatattataatgagtactagaacaagtaaataaactccgagtcccggatttctgacgtatggaagccgataagcatacgggaaggcgggaccaatgggtagcgcgggtaacggtgctgcctgtctgattgcgaaggagtccattattatgcggggcatgataatggatttttctatgtagagaaggaggtattggctaatgggtaagcagttattaattaagcccgaaaaatgcctgggatgcagaacctgcgaactggtctgctctttcgggcacaatggagcattcaatccaagatttgccaacgtcagcgtaatggcctatgaggaggcagccattagcgtgccgatgatgtgcatgcagtgcgaagagccctgctgcatggaagtctgtccggtgggcgctatattcagagacgagaaggatgctgttattatcaatccggataagtgtatcggatgcaagatgtgcatgaacgcatgtcctctcggcaatatcgggtttaatacagagagaaggcaggtacataagtgcgatttgtgcggcggagaccccaaatgtgccaagttctgtccgacaggagccatctcttacgaggatccggaagagggaatcgacagaaagcgtgcggttgccgaccactttaaagatgtgtttggagaggaggcaaaagcatgatgtatggatatatgggacagatcatcagagtaaatctatcgaacggcagtataacaaaagagccgctgaatatgaagtctgcacaggatttcgtaggcgcaagagggctgggaacgaaatatttctgtgatgaggtggatcctcagacagacccgcttggaccggacaacaaactgatatttatgacaggcccgcttaccggaaccgcggcatcctgcagcggccgttttgaggtcgtggcgaaagcgccgcttaccggaaccataggcgctgccaattccggcggacattttgggccggaactgaagtatgcaggctatgacggcatcatctttgaaggcgtaagcgatcatccggtctatctgtatatcaatgacgatacggtagagttaagagatgcgcaggaactgtggggaaaaacggtatatgatacgacagacgagttgaacaaggcctgcggatcttctttccggatctcctgcatcgggcctacaggcgagaacctgtgcctgtacgcgggcgttatgaacgacaagcaccgcgcggcaggaagaggcggcatgggagcggttatgggaagcaagaagcttaaggcagtggcggtaaaggggacgaagtccatctacgttgcaaggccggaaggcttcatggatgccattgaaaacgccaggaaggtactgaaagcacatccggttaccggcgaaggcctgggcgcatatggaacggagatcctggtcaacattatcaatgagtcgggagcgctgccgctgcgcaatgggcgtgacggttccttgtatgcggatgcggataacatatccggcgagacgctggcagaaaaatatctggttcgaaacaaaggatgctttggatgctgtatcggatgcgggcgtatcgtagacatcccggacggaccgttcaagtccaggggagagggccccgagtatgaggcaggctggtcctttggcgcagactgtggcatcgatgatctggaggcggtgtgcaaggccaacttcatctgcaatgaatatggattcgatccgatcacgcttggctccaccattgcctgcgcgatggaattgttcgaggcaggatacctcacagaagaggacactggcggcatcccgatccggttcggggatgcggcgacgatggtaagactggcggagatgacaggaaagaatgaaggattcggcgcacagctggcaatgggctcttaccggctggcagaaagatatggccatccagaactttccatgtccgtaaagaaacaggagatgccggcctatgacggacgcgcgatgcagggaatcggccttgaatatgcgacctccaaccgtggcggctgccatgtgcgtggctatatgacgtctccggaagtcctggggcttccggttaagatggatccgctggtaacagaaggaaaggcctctatgctgaaggtattccaggatcttaccgcactgatcgattctgtaggaatctgcctgttcacctcatttgccatcggactgccagaagtagcggcgcagtaccgggaggcagtaggaagcgatgaatcggatgcggatatcctgctgaagggcgagcgtgtctggaaccttgagaagaagttcaacatcgcggccggcgtggagaaggataccctgccgccgaggcttcttagggagcatctgccggaagggcctgccaagggcaaggtgaatgacctctacacaatgctgacagagtattatcaggttagaggatgggatgcagaaggcgttccgacaccagataaagaaaaggaattaggattatagaacggaatcatgaatcataaattgcggcagggcagcgcccctgccgcaggcaaaaggagatgaagcaatgcagatcaagttttttgcttatctcagagattataccggctgcaagacgacggatttcccctatgaggaagatctttatcatctggcgcattccttatgcgacgtttacggggataggctgaggaaaaagatgcttacgccggatggggaagatctgggagaagagattattatcctggtcaacggaaggcatgtggcgcacctgggaggcatccatgcgaagcttcttcccggcgatgtggtatcgatctttccggtcgtggcaggcggttaaaggtggtggaattgttggaagtttccaaagaaagtattgagaggatcattcattcctatgaatgcagccagagatatgcgctggctatcatgcaggatatgcagaggacttaccagtatgtgccaagggaaggcttagaggccttggccgaatatctggggtgtccggtatcggcgctgtatgccatggcgacgttttacaaggcattgagtctggtgccaaaaggcgagcataccatcaaatgctgcgatggtacggcgtgccatatccgcggcgcatctacactgattgacgggatagagagagaattgggcatcagacccggcgagacgacgaaggacgggctgttttccttcgagacggtgaactgccttggctcctgcgcgctggcgccggtgctggtggtggatgacgtctattatgggaaagtgacgctggagaaactaagagagattatcgaggatgtccggaaaggtggtgctgcatagatggagaagcagattcttatatgctgtggtaccggatgccgggcaaacggcagcatgaaggttgccgaggcactctcggaggcagcggaggcaaaaggggccagggcccaggtgattgcggaagttaagactaccggctgcaatggattctgcgaaaatgggccgatcgtgaaaattatgccggataatctggtatactataaagtaaagcctaaggacgcagaagagattatagagaagacggttctggggggagaagagatcaagcggctcatgtatcaggatgacagcggcgcgagggtacgctcccaggaagagaatccattctatgcccatcagcagaaggtggcattaagacatatcgggaagattgatcccgagaatatagaagactacttaaaagaaggcggatacgaggcccttaagaaggcagtatccatgacatcggacgaaatcatttccgaagtagagaagtcagggcttcggggaagaggcggagccggattcccggcagggaggaaatggaggactgccgcttcttatgagaatttccccaaatatgtggcttgcaatggagacgagggagacccgggcgcattcatggaccgctcgattctggaaggcgatccccactgcgttatagaaggactggccatcgccgcggtagcggtaggagccgaggaaggcttcttctatatccgggatgagtacgacctggcagtgcgtcatgtaaagaaagccatcgaggatgcaaaggccagaggcattatcggcgaatccgtgatgggctcgtctcacaggctggaactgtcggtagtcaggggcggcgcgttcgtatgcggcgagtccacggcgttgatggcatcaatagaaggacgggtgggagagccccgggctaagtatatccgttccgtgcaaagaggcctttggaaccagcctaccgtgctgaacaatgtggaaacgctggctaatataccggtgatcatcaagaaaggcggggaggcctttgctgatattggaacagaaggcagcagcgggacgaaggtctttgccctggtaggaaaggtaaaaaggaccggacttgtggaagtgccaatgggcacgaccctgcgccacctgatctatgatatcggcggcggcatcctgaataaccgggcgttcaaggctgtacagacgggagggccgtcaggaggctgtattccggaatccatgctggatctggaagtggattttgattcgctggcgaagtacggagccatgatgggctccggcggtatgatcgttatggatgacagaagctgcatggtggaggtagccagatactacaccaacttcctgtgcgaggaaagctgcggaaaatgtacgccttgccgcgagggcttaaggcggatgctggagatccttacggatatctgcgagggcaggggaagagaaggagacattgaactgctggaacgtctggggcgggctatgcaggacgcgtccctttgcagcctcggaaagacggcagccaatccggtgctgacgacgatccagtatttccgggaagaatacgaggcgcatatccgcgagaagagatgtccggcgggcgtatgcaaggaactgaccaggttcgccatacagccggagaaatgtatcggctgcgacatgtgtgccagagggtgcccggcgagtgcgatcagcggtggcaagaaggaaatacatgccattgatccggagaaatgtatcgcctgcggaagctgcagggaagcatgcaagtttgacgcggtcattacactgggaagaaatgacgccgcagaaagggggcagcaggcatgatagagattacgatcaacggaaaagcatgtacctgcgaaaagggagagttcctgcttgaagtagccagaaggaatggcttttacataccgaccttatgccatcatcccggagtagcggaacaaggatgctgccgggtgtgcctggtagaagtggtggaaaacaaaagaagcaagatcgtggtatcctgcgtttaccctgtggagcagccctgcgaagtgtacacggacagcgcccgggtaagggaagaccggggcgctgtcctgatgcttctggcagcaagagccccggaaagcacggagatcaaagccctgtgcaagcagtatggggccatggatggcagccgttttgccccgatagaaggggagaagtgcatcatgtgcggactatgcgccagggcgtgcgcgagccttggaacgggagccatctctaccgtcatgcgcggaacttccaagaagatatccacgccttacgacgaacccagcagcgcgtgcatcggctgcttaagctgcgcgaagatctgtcccaccagagccattgattttgcggaggatgagaagaagcggagcatctggggacgggagtttgaactgatccgctgcaaggaatgcggcgcgcccataggcacaaaggaagagatcgaatacgcggcaatgcgctgcggcgaagaaccgatgtatctctgcccggactgcaggaaaaagaagatggcagacgtgatggcgcacgcttatggcgtggaatagacttaaaacagaaaatgacgcttgaaagaaggaacgcaatgtgaaagaccagtatggacgaaccatagattatatccgaatatcggtgacggaccgctgcaatctgagatgtgtctactgcatgcccgaggaaggcgtagagcaggtggcgcatgaagagatcctaacctatcaggagattgtaagaattgccgggctgtgcgcccggatggggatatcgaaagtaaaattgactggcggagagccgctggtacgcaagggcctctacagcctggtgagagatctgaagagatgcgaaggcatcgagcaggtgacgctgacgaccaatggcgtagaattaaaaagccagatggaggaacttgccaaagcagggctggatgctgtcaatatcagcctggatacgctggacgcgggcatgtatgcctctgtcacgcgccgggatatgcttgatcaggcactggaaggacttaaggaagcgcttcggtatccacaggtcaaggtcaagatcaactgcgttcctatgagaaatgtcaatgaaggacagtggacgacactggcagggctctccagggatctgccggtggacgtgcgcttcattgagatgatgcccatcgggctgggaaaagagttccaggggaggagccaggatgatatccttgcggcgcttaggaaggcctatggacaggagaccctcttttatggaaaatgtggaaatggtccaagtatatacgtaaaatttccgggattcaaaggaaggataggattcatcagcgccatatcccataagttctgcggggaatgcaaccgtatccggcttacctcggaaggcttcttaaagccctgcctccagtatgaaaacggaacggatataaaaggaccgctgcggcgcgggcaatcagatgaagaactagccatgcttattgaggatgctatatatagaaaacccagaagccaccatttcgaacaggcagaaggggaagggtttgaacaaagacagatgtcaaagattggaggatgataacgttgggaaaagtgatagcggtctgcacaagcccggccaagggaacgcagaagacaagtgtagaacgggcagtgttcatcgaggattatggaatcgagggcgatgcccatgcaggcaaatggcaccggcaggttagccttttatcctatgataagatcgaggaatttaggaagaagggcgcccaggtggcaaatggagccttcggagaaaatctggtagtggaaggaattgattttaaaacgttgccgattggcacgatctttcaatgtaatgatgtcatcttggaactgacgcagattggaaaggaatgtcaccatggatgcgagatattccagaaaatgggcgactgtatcatgcccagggaaggcgtattcgcaaaagtaatcaaaggaggtgtgattgaagccggcgacattttaaatatagtaaccgattaaaaattacatatcaattgcaggaattcgagcctgactgtctaaagtagcaaaagatgccatgacagcaggccaatgggtgctttttgaaaagagggcgccttccatatttgaaaagaatatccgcagacatcgataggagtattttgcgtggtcttctttatcagaggccatttttttaatgggagcgtggcaatagaatgtaatggtacatgctgaaggaggaaggattgtatgaaaaagaaggttttgacagtgatgcttgtagtggcaatgtgtctggggcttgcggcctgcgcgagcaaagaggagcctaagaaagaggagccgaaaaaggagacagaatccaaggactcggtgaaggataaagggaaacttatgatggcgactacgaccagcacggaggatacgggacttctggactatctgaagccgctgtttaaagaggacaccggatgggatctggaatggaatgccgtaggtaccggagaggccctgaagatgggagagaatggggacgtggacgttgtacttgtccatgcaaagaccagcgaagaggaattcattgcaaacggctatggcgtggagcgatttccagtcatgtataatgatttcgtagtgattggtccgaaagaacctatcgccaagacggaagacattaatgccgtattcacacagataatcaatgaccagcttccattcgtatccagaggcgatgactcaggtacggataagaaggaaaagaagatatggagcgaacttgggcttgaccctgcttcagatccgaactacgtagagtccgggcagggaatgggcgcgaccattaccatggcggacgagcagaaggcttactgcctgacggacagaggaacctggcttaagcagagcaaggacgcgacgcttgatagcgaacttgagattatctgtgaaggagacaagaacctgctgaaccagtatggggtaattgccgttaatccggagaagtatccggagttgaataatgaaggagccaatgattttattgagtggatatgctctgacaaaatacagaaactgattggggaatatggaatcgacgagtacgggcaggcattatttacgccgaatgcaggtaccgattcatagacaggaggaattagcagatggtagagtggttaaaaagcgtgatatcagatccgggaattatcagtgctatcaaagtgacatttacgatggcagtctgttctaccgcgatatcatctgtgctgggaatcgtgctggggcttctccttgagaggttccagtttcccgggaagaagattgttatccggatcaaccggacgctgatgggagtgccgccggtggtcgtgggcctggtggtctatctcctgataatgcgcagggggcctttgggccctttgtcgcttctatttaccatcaaggggatggtgatcgcgcagacgctgatcattacccccatcatatgcgggatgatctattcctatgcaaggaaggcagcgccttcgatcagagtattcgcggtgactatgggggcggacagatggcagacggcgaagctgacggtgcgcgagatgaaaaaggagatttatttctgcatggttaccggattcgggcgctccatcagcgaggtgggggcagtcatgctggtgggcggcaatatcaagggcaggacgcgcacgatgacgacgacgatctcgctgctaaagagccagggaatattcacggaaggagtggcgcttggagtcctgcttctggtcatggcattcctattacagtggatatgcgatatactccagaaagaggaggcggaggatgagaattactaacttggaaaagacgattggaaacttccatctggaagttgatgatttatatatagagccgggaaagatccacgggatcgtggggcctaacggatgcggcaagacggtgttccttaagatggtagccaaaatattgaagccggacggtgggaacatcgattatgaggggcttacgggccgggatattacgatgatgtcccagaggccctatctgatggatgcatccgtctatcagaacctgatatacccgcttacgcttcgagggatcaagccggatgaggatgcggtagaccggacgcttgaaagagcgggacttttaagccagaagaagcagtacgcaaagtccctctccagcggggagcgccagaaactatccttcctgcgggcgctgatcttccatcccaaactgattatggtggatgagacgctgtccaatctggaccaggagagcgaggcgctattcgagggaatgatcgtggaggtgcagaaagaggcgccgattacttggatgatcgtaaatcatcagctggatcatatctatcagctctgcgaccagatccactatatggaaaaaggaaggtttgtgagatcatgaaattgctgaatgtagacacattggaggaggcccgacggaaggtgataagagcgatggagggctcgcctctaagagtagaagaaatagaacttctaaaggcacaaggatacgtgctggcagaggatgtctgtgccagagagaatgtcccattattccgaagatctacggtggatggctatgcggtccgggcagcagataccggaggcgcaggcgagagtattcccgcattcttaaggatcgtgggggaggtggagatgggctgtgcgccagagatggaagtcacgcccggaacctgcgtctatgtccctactggcggcatgattcctgaaggtgcggatggagtcgtaatgatggagttctgcgagttgttctcggatacggaagcggcagtctataagccggtggcagcgggggctaatattgtagaagccggagatgacatgaaacaaggacagaaggttctggaaaaagggacgaagatcacgccccaggcgatcggagccctggcagcgcttggaatcaccagggttcgtacatactgtccctggaagatcacggtgatatccacgggagatgaactggtggcgccccgggagacgccaaagccaggccaggtgcgggatatcaacacgtatgggatctatgcgacggccaggcagatgggctttgaggtggcggaatgtgcggtgctcaaagatgacagaatgctgcttctggagacggcgcaaaaaggaatggaacaaagcgatatcgtagtgatctccgggggaagttcccaagggaagaaggatgagaccaattccgtgatagacgaactggccagcgaaggcgcatttacccatgggctggcccttaagccgggcaagcctacgatcctgggatatgaccggcctacgcagaccctgctggcaggacttccgggccatccggcggcagccatgctggtattccggctggtgattgggtggctgtggcgcacagccacaggggagaaggaaccctatgtgcgtacggcggagatatctacgaaccttccggcagcgccggggaaactgacctgccagctggtgcatcttgcgaggcgggatgagggaagccttgcggccatcccgatatttggacgctccggacttatcagcacgctttccggggctgatggctatatattgattgaagagaataaggaagggctgaaaaagggagagcgggtatctgtatacgagatttgaaggaggagccatgggaaaacggaatctatacttaaaaaccataccagtggaggaggcgcaggcattataccaggatgcgttgaaggcaattgccgtcaggaggacggagaagataccggtagaagaatctttagggcggatgacggcaaaggcaatttacgccagatgctgctccccgctgttcaatgcggctgccatggacggcattgccgtgatcgcgaaggagacagccggagcaacgcaggagaatccgctcaccctcgtcagagggaaggattatcagatcgtagatacaggagatccggtacatccgccctatgacgcggtgattatggcggaagacctgctggaagcggaggaagacgtggtacagatcatggaggcggccagcggctggcagcatgtgcgccctataggagaagatatcgtggcaggggaaatgctgcttcccggcggccataagattcggccgatcgacatcggcgtgcttctaagcggcggcatactggaagtcgatgtaataaagcgtccgagagtgggactgatccctacggggacggagatcatagagccggacaaagagccgggcgagggggatatcattgagtccaattcccgtatgttcgcggcgatgaccatcaattacggaggcatcccccatcgatatgctccggtggaggatgactatgacaagatcaaggacgccataaaaaaagcccatgaagagaacgacatcgtggtggtgaatgccggatccagcgcggggacggaagattacacggtacatatcttacgggagatgggagaagtgctcgtccatggggtggcaatcaagcctggcaagccggtgatcctctccattgtggatggcaagccggtgataggcctgcctggctatccggtctctgcatatatcgactttgagaattttgtcaggcctgtgatggataagatgtcaggagaacgccattacgccggacataccgtcaaggcagtactttccaaacgtctggtgtcttcgctgaagcaccgggaatatgtgcgggtcaaggtaggcaaggtgggagataagctgatagcctctccattggcaagaggcgcgggggctgccatgagtttggtgcgggcggacggattctgcgtcattgaccagaacagtgaaggagtagaggcaggcgagacggtggaagtcgaactctaccgggatatagaggagattgagcacacggtggtatccatcggaagccacgacctgatcctggacttcctggcagacctgatgccgctatcttatccgggaaccttcctgtccagcacccatgtagggagcatggcagggctgatggcgctgaagcggggagagacgcatatcgcgccgacccatctgctggatgaagagacgggagtgtacaatgtctcctatctgaaaaaactattcccgggtaaatgtatggcgctgatcaaaggggtgaagcgtatccagggaatcatcgtccagaagggcaatcccaaaggaatccgcgggatcgaggacttgacgcgggttacgtacgtcaacaggcagcggggcgccggtaccagggtattgctggattaccggcttaagacagccggaatccgtccagaggagattgacggctacgacaaggaagccgcaacccatatggcagtagcggccctggtgaaaaatggcggggcagacgcagggatggggatatattcggcggcccacgcgatggatctggacttcatacctgtgggagaagaagagtacgactttgctatagaacaggagtccctggaactagaagagatcaagaaattccttgaagtactgaaaagcagcgcattcgcgcaaaaggcccgggaggccggaggctatgatattagccatgccggggaagtggcgaggttataaaaatagtactagctttcttgtggaataaatggtataatacaaaaaggtttgaagacaagggagcaaaagacatgaaaaaaccatttacttttattgatttattttccggtattggtggatttcatcaagcgatgagcagtttgggcggacggtgcgtgttcgcctctgagatagataaatattgtattgagacgtatcaggaaaattatggaatggactcgggcattgatatacgcaatgtcgatgagaaggatatcccgccgcatgacgtgctgtgcgcgggattcccttgtcaggcgttcagcaaggcgggaaagcaggagggcatggaagacgagaccaggggcaccctgttctttgagatcgtgcggatcttgaagcatcatcatacgccttatatcgtgctggaaaatgtgaggaatctggtgtcccatgaccatggaaatacctggaaggtcattcgggcaaacttaagaaagcaaggctaccgcctgatggagaagccgttgatcctgagtccccatcactttggcgtgccccagcttcgagagagggtggtcatactcggaaagtacgagccgaaccgcgtggacgagccgctggatatcgcattccacgatctgataaagaaggagcagaattcaatctacgacgtggtaaaggatcatccggtggataagaaatatgccatatcagagcacgaagagaaggtgctgaatgcctgggacgaattctaccatggcattgatatgaaggtgatcggattcccaatctggtccgagttcttccgctatgagaaggctcctgcagagttcccggcctggaagcaggagttcgtcaataagaacatccggctgtatcagagcaaccagaagttcattgaccagtggctgaagaaatataacgatcttaaggattttacgcccacccagcgcaagatggagtggcaggcaggaaccaatattgacagcgtatgggaaggggtcatccaattgcgcccctccggcgtcaggatcaaggtgcctacctgttttccggccctggtggccatcgtgcagattccgatcatcggcagatacaaaagaaggcttacagtggaagaatcagcagccctgcaaagctttcctgcgaagtttatctccaatgccaatgaccagcaggcttataagcagtatggcaacagcgtgaatgtgacggtgatcgcagaatgcgcgaagcggctgtttgatctatagaaaagttaaattgtgacgtcgcagatagaaaacttgctgatcatatcatggtctatcataatcttcggctcccgcaacttgccattgctgttgacgccctgtcggaacatgctgaggaagtgcttattggagttattgatgtccaggatatgcatcttggttagcaccacatgatgcttcattcgcttctgatagctcataaggttggatttgccctgcgcgcgattccaaaactgggtagtctcgtatccgtactcgctgtccttgtaagtggcatgctcgcagataatgtaataaatgtggtgctcataatcggtctggcctagtatgccgaatatggtgttccagtcattcccctggatgcccttggaataatcgctgtgggctttaagatcgccgtaatccataagcgttggaaagtacagatccagatcgatgccgttcttcttcttgttctgctcgtagcggatcagatgctcaagcgaattctccttcagatacttttcgaatcggtactccagatagaatccggcccattccggctgatacttattccggtagttgtcggcgatcatttccttatagcagtcgatgccttcccagcggctgggcagcccaaggaagaaatcccggaagatatccacgatctcatccggcatcgtgccaagaaaggctggcgctgccccgggggcgggtgatggcaggcctgtaaaataatccaggatgttgaacgcagaatcctcgtctgcactggcctcctgcgattcggcttccaggccgaacttctctgacaggaaggtttcggcacagtccgggcgaaatacggttatgtgatttccacggtagtccgtcttctggaagatgccgtcctccgccgcgaaggatagatcctcggtatagacatgggcggaagaattgttagacttctttgcgacgaaatcctcaatattaaagtcgcaaaacagtgtcaggtcatcccgggtataaatgcccaaaagcagcggagtcattccacgtgaaagggaatcgttgtagaaattcttaagatctccggatatctggatccgttttttgaaaacagggtgggggatgccaagataggtgatgttcttcacccggatggagtaagggcgatctttaaaattcccggttatcattccattgtctttccggatgtccgggaaatatgttttcaagacttcaaaaagacctttggccgataggctgatgtccacatccatgtatgtattgccatcatgatcgatctgttcaacgatggttcttcctctcataagcagtatctccttatcgtttaaatatttgtaatgcgcataccataataatatgtgccagggtgatgtcttctaaagatgattatacagtaaaatagaggtgaataagcgggactttattgttttttaatgaaaaacatgttacgttaatactgtattatgcaaaagtagtgagagaagtaaagaggctgaaatgactatctccagaagaatcagtttataatggaggactggaaaggcgagcctggagcagttgttcgtgaagcttcagcagccgatgccgacgccacaggggatgcaaaatccacagccgataccggtagcgcattctttgttataaagcaggattggggggtggaaaaatggatgttctcagcgagcagcagagaaggaaaacgatgcagcatatcaaagggaaggacaccaaaatagaagtccagctgcgaaaagcactgtgggcaaaaggataccggtaccggaagaactatgacaaactgagcggcaggccggatatcgttctgacgaaatataagattgccatcttctgcgacggcgaattcttccatggcaaggactgggagatattaaggcccaaacttgccaagggaaagaatccggattactggattcccaagattacaaggaaccggcagcgggatgaagaggtcaataaaaaactgctcttcgaaggatggacggtgatccggttctggggaaaggacatacagaagaatctggatgcgtgcgtgaaagccattgaagaagtcatctttgagattaagatggagccggaagaaatcggctgggaagatatggaagatgagattgggaaataaggcggctttgtggtatactttacattacaaggcatattccttctagctgtccgtaacacatgtctggacggagggaaaaagttcttgaacaatataaaaaccagggagtgacgttcatggagaataggacggtccgcatatttgcggacagcacatgcgatttgacggaggacttgattcaaaagtatggaatcaccatactgcccctctgtatcgtactggatgataaaagttattatgacagaacccagattacgccggatgagatatttgcctgggcagaggcaaataaaaggacgccaaagacggcggctatcacctttgaatacgcagagaagatgcttaggccttgcatggaagcggatgaggatgtcatcttttttggcatttccgaagaaatgagtacaacctgcaatgttatgcgtctcgcggcgaaagaatatgataagggaagggtattcgtgatagattcccagagcctgtccaccggaatcgggctgcaggtattgcgggccgccgagatggcaaggcagggaaagagagcagaggatatcgtgacagagattgaaacggcgcgctccaaagtgaaggccagttttgtggtggatacgctgacctacctcgccagaggcggaagatgttccggtgcaacggctctggtggcaaatacgctgaaactgcatccttgcatcaacgtaatcgatggcaggatggaagtcgggaagaaataccgtggcagcatgaataaggcattgctgcactatgtaagggaaaaggaagaagaacttaagaaggcggatggcacgcaggtattcatcacgcattcaggggtggcatctgagattgtggagcagatccgggattatctggcatctttgggacatttccatgagatactggagacgaccgccgggggcgtcatctccagccattgcggtccaggaaccttgggcgtgctgtattacgcagagtaagcgaggcagtgataaggcggcttgaagatatgacaagtaattttcgttttttaaaaagctttcttgatgaatatcttccggaagcagggcatttgtccctgcataaaaagaactaacttctggaataagtttaaccgataaatgtatatttctcctgaaatcccacagaataaaaagaaaaacggagcgagggatcaggatatggaaaaacagacggttgaattattaaaggaatgcaattctggatgcaagatgggaatcaacagcatgaaccaggttcgggaatatgtaatggatgagaaacttgcgaaggtgctgaaagagtatgacgagaagcacaagaagctggagaaggaaacttctaagctgctggcagaattcgggaaggatgaaaaggagccggagaagatggcggccgcattttcctggatcagcacggagatgaaactgatgatcaaggatgacgcctcccagattgccaagatcatgacggatggctgcaacatgggaatcaagagtcttacggaaaagatcaaccagtattcagacgcgtccaaggaaagcatatcgctggcaaaagacattgtcaaatgcgaggaggctttccgggatgatctgaagcaatttttataaagatcaaaaacaatatttcacttcaggatattcgcaagaatcttcgtgtattgctgtagtttgtcagaatcaggtaaacaatttcttattaagactcaggaattgcttgttctggagaacccaccgatactacaattataaatagaatgtcagcaaatggccggggacttatgcgacatctatataaaaactgccaatagactttttgatctattggcagtaattttatgtacttatattaccactaaatcgacaatttttcaagtcttgtaagcgtaccagccagggagtagaataggaaatcactacaagggggtgagggcatggaatatgagatggaggaactgattcctctggtaaaggaactctgtgacagatatacggggaaggagagcacatccgtgacgtatgaggcagcccagcggctgatggaagccgtgctctactgtattcatgagacgacagggagcgcagaagcggccggcgtctcggacggcagccggtcggcgagaatggcgtacgagtatggctatgaactggcggttcaaaaggtagtacaagcaagagaacgatataatcggatggtagcaaattttcgaagttatgggaacagagcctatgaggaaacattccggcagggaattccggcattcttcctatggtatgacgtccggctgaagccgcaggatcatatcattaccatggattatccggtaatgaagaatctggaagggctgtgcggcattgacgccatatgggagtatctcaggtgcatggaagcggagcagaagtttctggcaaggttcccggaagactatatccgccaggtgaatgtggcgcgctgcgcagactatgaggaatactacatcaatccgtgcagggttatgctccgtcatgtcctatgctgtatgcttgcggacattccggcagataagatccggttcggggaggaggactatatgcggctgaaagaggaagtgcaaaaccaggacaggggaggcctaaagagaaggctgacgcgccttttgtatgtgcttgtgaagcagaagtactgtgaggatgagaaactttttggatatctggaatatgatatggcagacttggcttttgaacttcaaaattggctttggaagcaagcaggcaggaactaaagcgcgtgcttgaatgcaaccagaagacgttgaagtacgggcttagcctgacggagttctgcgattcccagttcatccaaagcggggactatgcggataccctggcaaggcttcaggagatattctatctgtataagaatgaatccatggacgaattgacagatcgggaactgctggagattatgaaggagaactttgaacagatctgctacggagatctggaatacctggagacaacctgtctggaacggttcgcggctacagtccgggcaggatatgagacggaattccagaagaaggagagggatgagtatacgcttaggaagagcgggaacgagtatgagaaattctcggaagagaccagatgggaatttgaactgtacaggataaaataggaagagtcagaatagaaaaaccggttgacaaaagcgtaacaagttactaaaatgacaataagtaacttgttacgcttttgcaatatgaaaggagatttatgaaaaaagagaatccagttacatatgagcggatgggaaccagtcttgactggataaagaagttgattttcgcggggatattcatccaggagaataagctgcacgcaatatttgaccgctacaatgagatgtccagcaagcagtggcttttgatggcagtgtcggcttcgtttgatgcgccgccggtcctgactacgctggcaggggccatgggatgttcccgccagaatgtgaagaagctggcagtcaatcttgagaaggttggatatatcaaacttgaaaagtcggatgcggatgccagggcgctttgcgttaagatgacagcaaagggcatgaagttcgcggaatatatggcggatgtcacggatgacgtgcatgctgccatgttcggcgaatttacggaagaggagatccgcaagtactaccaattatctataaagttgatgcacggaatcaaccatctggaagcgtatttccagaatcagagaaaaggagaagcagaactatgatccgagtcatgtataagagcaggaagaataataagaaagtggcgcaagctatggcagaggcgctggggatagaggcagagagcattgatggagcgaaggatgtgaaagccgatctactgtttctggggtgcgcgatcctggccggaaacatccggccggagatggaacggtttgtagaagggctggatagtggcagcgtttccagggtggctttattttcatccaatggatatggcacggatcagttcgcagccttgagagagaaactgaaggcaaaaggcatagaagtggaagatgaggcgttttcctgcaaaggaagcgcatttatattcaagaacatggggaagccggatcaggaagatctggaggcggcaaagcggttcgcgctatccgtcagggatggcagaaggagttaaccaatggttgattttatttccgtaaatatcgtatcattccatggtgtttttctggattcttccgtatacttatagcaagaaaggagatgcgatatatggatacattgaatttggcagagaatctgatccgcctgcgccgggagaaagaagtcacccaggaagaagtggctaacttcattggcgttaccaaagcgtcggtttccaagtgggagacgaagcaaagtctgccggacattctgctgctcccggtgattgcgtcctattacggcgtgacggtggatgaactactgggatataagcctcagctggggaaagaacagatccagaagatctatcatgacctggcggcggaatttgcggaaaaaccctttgaagaggtaatggatgcaagcaggaaactggttaagaagtattactcctgctattccttcctcttgcagatcagtattctgtggctgaaccattatacatttgccgaagatccaaagagccagatgaggatcctggacgagacggtggaactgtgcacgcacattatagagaattgcaaggatatcagcatctgtaatgacgcgactgttctcaaagcgatcatggacctgcagcgaggaagaccccaggaggtcctggattcggtggaggatatgctgagtccctaccggctggccagccagagcagcgggattcttatccaggcctatcagatgataggagatatggataaggcggtcagttatacgcagatcagcatgttcctccatctgctttctctagtagaaggcgcgacacagtatattgcgcttcgtgcgcaggataaagaggcctgcgaggagacgatccgccggatggacggactgatagaattattccaattagaaaggctgcatcagaatatagcggcagtctatcactaccaggtggctgtctatcagtgccagcagaaggacatagatggggtgctcgcaaggcttaagaggttcgtggagattatctgcgatctgctggatcgtgaggcagccttgcatggagacggttatttcaaccgtctggaagaatggttcgagggactggatcttggaaagcagatggtcagagataagaaactggtattagacaacgcttgccaggctttggagaacacggtattttctccgcttatggaagataggcgtctggaaagattaaaaagagtattgacggaaaagagggagacattatgaatataaaggatatgctgccatttttgataccattggtcattgtagaactgattcttgtgattatcacgcttcgacatatcttcacgcaccagcattataagagggggacccgcgcgttctgggtagtgatgaccatcgtagggatgcagttttggggaccaattctttattttctgctgggaaaggaagatgcttagatggatatgctgacattatcccatgtatccaagcgctttggcgcaaaccaggtgatcgatgacttgaactttaaggttcccgcgcattcgatctatggatttatcggacagaatggggcaggaaagacgactacgatgaagatgatactgggacttcttaaggcggattccggagacatctttgtaaatggcgagaaggtctgctatgggcagaataggacgaaccgctatatcggctaccttccggatgtgccggaattctactcttacatggcgccgatggagtatctggcattgtgcggcgagattacgggaatgaagaaaaccctgattcgcaagcggtctatggaactcctggaactggtaggacttgagaagtccgataagagaatccagggattttcaagagggatgaagcaaaggctgggcatcgcacaggccctccttaacagcccaaagcttttgatctgcgatgagcctacgtccgcgctggatccgctgggaagaaaagagatactggacatccttctggccgtaagggaacataccaccgttgtgttctctacgcatatcctgtcggatgtagagaagacctgcgatgagattggcctgctccatgaagggaaagtggctcttcatggtaccatagaagagatccggcaaattcggaaaagcgatggattcgaagcagagttcaggaatccggcggattcagaaaaagccctccggatatgggcaggaggggagcgtaaggggaagaatctgatattttttgcaaagcaggatgagaaagatatggcatcagccatgcaaggcatgtcaaagaccggaatctatccgcttcgcatggaaatgcgggaacctacgctggaagcgctgtttatggaggtggtaggaagatgaggcagttaagcgcatttctaagaaaagaaggaatggaactcatccgtacgggtaagatatggattcttctgattatattcatattgtttggcatcatgaatccggcaatagccaaactgacgccctggatggtagagacgatgtcggacagtctggcagagtcggggatggtgctgacggaggttaaagtaaatgccatgacttcatggaaccagttctacaaaaatatatctatggcgctgatcatctttgccctgatgctcagtggcatcctgacaacggaataccagaagggcaccttggtaaatatgctgacgaaaggcctgatcaggtggaaggtagtcggggcaaaatccattgcctccatcggtctgtggacggtctgctactggctgtgctatggtatcacatacggatataatatgtatttctggaataatggcatcgcttctcatgtggcctttgcggccttctgcgtctatctgctgggaatctgggtcatgctcctgatcctgctgatatctacgctgcttaacaccgcttcgggggtgctggcagtaacgggcgtagcagtcatcgccagttatgtggccggaatgttcgggaagattggggaatatctgccgatacggctgctctctgctggtaatctgctggcgggcagcatgtctcctgaggatttctggaaggcgatagcggtggccctggcatctggcgtggtgttttttgtactgtcagtggcgtgctttaatagaaagaatattggatagactgcctggggaattgcgattccccaggcttgtgttataatataatccataaattagaatggagatatatcatgctatatacaatacctgattattatcagaatttcaaatgcacggccgaccaatgcgaggatacctgctgcgccggatggcagattgccatcgacaggaaatcattggtccgctatggaaaggtgaccgggaagttccgcagaaggcttaaccgttccatccggtggctggaagggacattcaagcagggcaaggacggaagatgcgactttctgaatgaggagaacttgtgcgatctgtattctgccctgggcaaggagagcctttgcaggacttgcaggctgtatccgaggcatatcgaggagttcgaaggcgtgcgggaaatcacgctgtccatctcctgcccggaggtggcgagaatcctgcttaaaaaagaagaaccggcaaggttcctggaatacgagaaggaaggcgaagaagcgtatgaagattttgacctgcttgcctattccaaactggcggagggacgggaggtcatgctcgatatcttaaggatgcgggaacttgggcttgagttgcgggcagggctcgtgctggcgctggcccatgatatgcaggtgaggcttaaaaagggagaagtgttttcctgcgaccaggtatttgaacggtaccagaaggagaaggccagggagtttatcagactgaaacttatggagtcgggagacaatatagaagaaagatatgcgttttccaggcaaatgttccagaacttgtaccagttggaactactccgggaagactgggagtctcatctgcgcgaatcggagtacctgctgtatggaagcgcggatgacagtcaggatggccgggacgcctatgggaagatgcaccaggatttcgccgcatggcttacggccaatatgccggaatgggagatccagtgcgagcagctgctggtatattttatctatacctatttctgcggggccgtctatgacgggagagcctatgcgaagatccagatggctgtggtcagtgttatgctgatctacgagatgctggcggcaaggtggaggaagaatgagaagcagctggactttgaggatgtggtggagattgtctaccgctattccagggaagtggagcattcagaccagaatctggaggcaatggagcaaatgatggaagaacaattgatcccatggttttcaaaggagagatgcaaggaaaggattgagggaaaggaaggaaagatatggatgtaaatatgacaggaaatacggaagaaaatacgcaaagagagcaaaatctgaaaactgcgggacaactgttttcctttatacaggcaagtcccagccctttccatgcggttgcgaatatgaagagggaattggacgcgcacggatatgcccagcttctggaaggggaagaatggaggctggaagaagaggggaaatattatgtcatccgtaacgggtcggcattaatcgcgtttcggattccaaaacgggatttcttgggattccagattatggccagccacagtgattctccaagtttcaagatcaaggaaaatccagagatggatgtggaagggcattacgtgaagctgaatgtggaaaagtatggagggatgctgtgcgcgccatggtttgacaggccgctgtccgtggcgggaagagtcatcgtaaggaaaggaagccgtctcgtaacaaggctggtgaatgtagaccgggacttgtgcatgattccgaatctggcgatccacatgaaccgggaggccaacgaaggctacaaatacaatgtccagaaagatatgctgccattgtatggatgcggagaagctaggggaaagttcatggaagacatcgcctgtgcagcaggcgtggcgcaggaggatatgataggaagcgatctgtttttatataaccggatggaaggaagcatctggggagcgcaggaagaatttatttccatcggaaggctggatgacttgcagtgtgcctttgcatcccttcaggccttcctggaggaggatggcggagacagcattccggtacactgcgtctatgacaatgaagaggtggggagcggtacgaaacaaggtgcgggctctacgttccttctggatacgctgctacgggtcaatgaagggcttgggcgaagcccgggccggtaccgccaggcgctggcatccagcttcatgctgtctgcggacaatgcccatggcgtacatcccaattatcccgagaaggcctgcccgaccaatcggccttatctgaatgaaggaatcgtgataaaatacagcgcgaaccagaagtataccacggatgggatggctgcggcagtatttacgcagatctgtgaaagagccggtgtaccagtgcagaagtttctcaaccgttcggatattctgggaggctctacgcttggcaacatctcgggaacccaggtggcgctgaattcggtggacatcgggctggcccagctttccatgcattctccgtacgagacgggtggcataaaagatacggattatctgatcgcggcggcaaaggagttcttccggtcatcggtggtggaaataggcagcggagaataccgctctttgacttctgctcccaaaagtactataattcgatagtaaatgacagaaagggagttggaaatcatgagtaaaagaatcgacaagaagagaatgaagagacaggcgaaaatcacatctgcaccgcgtgatatgcaggcatcggcagcaaaagagacagagaatatagacttctacatccagtatcagggccaggagtacctagagcgggagattatagagcgaatcaagggaaaatgcaaggaagaggggactttgactgcaggaaatgaaaagttatctgtctacctgaagccggaagaaaagaaagcgtactatacgtgcgatggaggtaatggagagatagacctctagtccaatactgcaaataccaggaatagtattatgaagtgattcgtaatactattcctttttcattatggcagccaccagactacaacatttattgctaaagcctatgaggatatcaggaatttcaataaatacagcgattctttctatgatagaataaggtggaatgggaggcttttatggatttacataagatgcaatattttaaagatgtgtacgaactgaatagttttacgaaagctgcaaataaaaactttgtgtatcagagcgcagttacccagcaaattgcgtcgattgaaaaagaattaggcgtgcttctgtttgaaagggagcacggaaaaatcacccatacgcaggcagggaacattttttatcaggagtgccgggatatattggatgaatatgaacatgtgttggaggaaattaagaatcactcatcgcataaagtacagatccagaaaaagttaaaaataggattttcaggtgtaatggagaataacttcataatgctgatcaatgaatatatgtgcaggtatccggaggtaaggattgattttatcgaaggcagttatatgtctttatgcgagaaacttgtcagccaggagattgatattatattcggcgtggcgtgtgaactggaaaatattccaggaacagtctggaaggttctttttacggagaatcagaagattctcctgtccaggatgaatgaattggcagaaaaagatgttttgtctatggatgaacttggaagtcagactttaatcgtgccttccaaggatatgatgcccagttgtcataaaaaaggaatgcagttatgtaaaaaaacaaaatatcggatgaatattgattttgtggattcttttgaagcatcaaagggcttaaaaaagaactttggagcgcttaaggtcttggatggaatatcctttgaactggaagaggggcagatccttgcagtaatcggtccatctggaacaggcaaatcaacattgctgcgctgcatgaactatctggagaagcctacagaaggcgtaataactattgacgacattacgctggatgctgcaaaagccaaaaaggaagatatatatttacttagatctcatactgcaatggtgttccagaattataatctgtttaagaataagacggcattggaaaatattatggaacccatggtatctgtccaaggtattccaagccagcaggccagagagcgtgcactggaaattctaaaggcaatcggactgacggagaaagaaaatcattatccgtcgcaactttccggaggacagcagcagaggatcggaattggaagggctatggcggtgaagccgaaagttatgctgattgatgagccgacttcttccttggatccggaactggtaggagaagtcctggacctcttatataaactggcaaggcagcatacaaccatgataattgctacacatgagatggagtttgcaaggcatattgccgatcacgttatttttatagaagaaggaaaaatagtagaggaaggggagcccggctcgttctttgactcgccaaagacgaagcgcgcgaaacaatttctgaagaagtttgaagtaaagagggactgatagaagaggaatagttaggaaatagagtttaggaaagataaatccgggaaaggcctgtatgggtctatcccggattttgcttttaagtattaagtttaattcttatctttgatttcgctgtgcaattgttgcaatgactcgacatctccgctgccatgctctttcacgtagcggattcccttggcagttgctcttgcagccgcgatggtggtcatgtaaggaatcttgcctttgatggcagccttgcgcaggtaactgtcatcgtggacgctgtccttgcctaccggagagtttacgatcaggtcgatcttgccgttggtgatcatatccaggatattcggacggccttcgtagagtttctttaccttctcggcctcgattcccgcttcgcggatcagatcacaggtagttcctgtagccacgatcttgaatccatcttcggcaaagcttctggcaatctctacgacctctgccttgtccttgcggtttacggagatcagtaccgttccgttaagaggcagtttggactgggcagcctcctgcgccttatagaaggcttctccataagatggagacaggcccaggacttctccggtggaacgcatttcaggccctaataccgggtcgacttcctgaaacatgttgaacgggaatacggcttctttgacgccgaagtaaggaattatctgttcttttaattccggtaccggtgatggacgtcctgtgatgtcggaagtgatgatgtccgttgccagaggcaccatgcggatgttgcagaccttggataccagcggtaccgtacgggacgcgcgaggattggcctccagcacgtatacttttccattctcgatggcatactgcatgttcatcaggcccttgacatgcatttcttccgcgatctttcttgtatattctttgatggtccttacattttcttcggaaatatgtacggacgggatgatgcaggcggaatctccggagtgtacgccggcaagctcgatatgctccataaccgctggaacgaatgcgtgggttccgtcgctgatcgcatctgcctcgcattcgagggcgtggttcaggaaccggtcgatcaggatcgggcggtcaggcgttacgccaacggccgctttcatgtatccttccatactttcgtcatcatagacaacttccatgccgcggccgccgagaacataagatgggcggaccatgaccggatagccgatctctctggcaatggccagcgcttcttcaacggtggttgccattccagattccggcataggaatctctaatttttccatcatctcacggaacaggtcgcggtcttctgccaggtcgatgacagacggcgaagttcccagaatcttgacgccattcttctcaagctcggatgcaaggttcagaggagtctgtccgccaaattgggcgataacgccaagcggcttttccttattataaatgcttaacacgtcttccagagtgagaggctcgaaatacagcttgtcagaagtatcgtagtcggtggaaaccgtctctggattacagttgacgataatcgtctcgaatcccagcttcttaagagccagcgaagcgtgtacgcagcagtagtcaaactcgatgccctgcccgatacggttcgggcctccgccaagaatcatgatctttggcttgtctgtacttaccggattcttgtctggcgcattataagtagagtagtagtaagcgctgtcaggcgttccgcttacgtgcacgccttcccatgcctcctccacgccaagtgccaggcggcggctgcggatatcgtcttccggaatcgccaggatctggcttagatacttatctgaaaagccatccttctttgccgcggtcagcatctcgtcggatgggaggcttccccttccggctgccaacgcttcttcttcctccaccagttctttcatctgctggataaagtaagtcttaaccttggtgatctcgaagatttcctctacagtcgcacccttgcgaagtgcttcatacatgatgaagtgacggtcgctggatggagtgatcagcatctggagaagctgctccttagtctttgtgttataatccttggcataacccaggccataacggccggtctcaaggcttcggatagccttctggaaggcttctttgtatgtcttgccaatactcatgacctcgccaaccgcgcgcatctgggtgccaagcctatcttctacgcctttgaacttctcaaacgcccagcgggcgaacttgattacgacataatccccgtccggaacatatttgtccaaggttccatacttgccgcatgggatatccttaagcgtaaggccggttgccagcatggcagataccagggcgatcgggaatccggtagccttggaagccaatgcggaagaacgggaagttctcgggttgatctcaatgacgacgatacggtcgctgacaggatcgtgggcgaactgtacgttggtgccgccgataacctgtacggactctacaatcttgtaagcctgttcctgcagacgcttctggcattcctctgaaatagtaagcatcggagcagaacagaaagaatctccggtgtgtacgcccagggggtcgatattctcgatgaagcacacggtaatcatattgttgtcggcatcgcggacgatctcaagttcaagctcttcccagcccaggatggattcttctaccaggacctgtcccacaaggctggcctgaaggcctcttgcgcataccgtctttaactcatctttattatataccaggccgccgcctgcaccgcccatggtgtaggccgggcgaagcacgacaggatagccaaggtcatcagcgattgccagcgcttcttctaccgtgtaggcaacttcgcttctggccatctcgatgccaagggcatccatggacttcttgaattctatacggtcctcgccgcgctcgatggcattcacctgtacgccgataacctgtacgttgtacttttccagaatgcctgcctttgcaagttctgagcaaagattcagcccagactgtcctcccaggtttggaagaagcgcatccgggcgctctttggcgatgatctgctcaagcctctctacatttaatggctctatgtaagtgacatccgctgtctccgggtctgtcatgatggtagctggattggaattgaccagcacgatctcatagcccagcttgcgcagcgctttgcaggcttgggtacccgaatagtcgaattcgcaggcctgtccgatgatgatcggtccagagccgataataagtactttgtgaatatctgttctctttggcatatgtatcctcctaatatgacatgcatggcttatggaacacccggttgcgtgttcgattgcgagcctccaaaaaccctttatcctctattatatagtagattgaaaaaaagggaatagggaattttaccaaatatggagaaaaaacatggaaaatttctcgattttttggcataaaatatatttcttataaaactgtgaattgtaaaagcctctttcttatgataaagtgggtatagataaatgttgattaaatttatatgcaaggggataaaaaacatggaaagaagagtaggaactatatcaagaggaatccgctgcccgattatccgtgaaggagacaatctggcggatattattgttgaaagcgtattagaggcagcagaaagcgaaggattcgaacttcgtgaccacgacgtgattgcagccacagaatccatcgtggcaagagcgcaggggaattatgcgtctatcgatgcgatagccaaggatgtcaaggcgaaattgggcggagagactataggagtcatctttccgattctgtctagaaaccgtttctccatctgtctgaaaggcatcgcaaaaggcgccaggaaggtagtgctcatgctgagctacccaagcgatgaagtgggaaatgaactggtttccctggacaagcttgatgatgcaggcattaacccgtacagcgacgtgatggatctcgagaaataccgcgagctgttcggagagaataagcatccatttactggtgtggattatgtgcagtattacagcgatctgatcaaagaggcaggggctgaagtggaggtcatcttcgcaaaccagccgcaggaaatcctgaagcatgccaagaacgtgctgacctgcgatatacataccagggcaaggaccaagcgcatcctggagaagaatggcgccgaagtagttctgggactggacaatatcctgacctgtccggtggacggaagcggatgcaatgaacgcttcgggcttcttggatctaataaatcaacggaggaatccgtgaaactgttcccaagagactgcacagacctggtactggaagtgcagggcaagattcttgaaaagaccggaaagcatgttgaagttatggtatatggcgacggcgctttcaaagatccggtaggaaagatctgggaactggcagatccttgcgtatccgtttcccataccgaagggctcaacggcacgccgaatgaagtcaaattaaaatatctggcagacaatgattttaaagacctgaagggcgaggcactcaaagacgccatctccaagagaatccaggagaaggaagacgacttggtaggtgatatgtcttcccaaggaacgacaccccgccgcctgacagacttgatcggctctctgtgcgatctgaccagcggttctggagacaaaggaacgcctgtgatcctggtacagggctattttgacaacttcaccaccgataaataagcggcagccaagcagatgccagtcgaattagagggttagacaagttagatataagacaagtcagagataagtcaaatcagatacaagataataatggattagtgacaggaaaaaatactcaggaggaaatgaaacgaatgaagcaggatatgattgtaattctggatttgggcagcaccgagaatacggtagttgccagagaaattcgcgatatgggcgtttacagcgagattcatccccatgacatcaccccggaagaactgaacgggctggataatgtgaagggaatcatcttaaacggaggagagaaccgtgtcgtagacggagtagcggtggatgtaagtcccgcactctatgatctgggatatccggtgatagcaattgaccatccaacagccaaatgcgcgcagaaactggatgcgcttccggatgaggcgacccttaagaaattcgtatttgacgagtgcaaggcggagccaaactggaatatgaagaacttcatcgctgaccaggtagaactggtgaagcggcaggtaggcgaccgtaaagtccttcttgccctgtccggcggcgttgattcttccgttgtggcagcgctgcttctgaaggcaatcggccagcagctggtatgcgtgcatgtaaatcatggcctgatgcgtaagaacgagtcagaaagcgtagtggaggtattccagaaccagcttcacgcgaaccttatctatgtggatgccacagaacgtttcctaggcaaattggaaggcgtgaaggatccggaagaaaaacgtaagattatcggcggagaattcattcgcgtatttgaagaagaagcaagaaaactggacggaatcgacttcctcggccagggaaccatttacccggatatcatcgagagtggaaccaagaccgccaagatggtaaaatcccaccacaacgtaggcggattgccggaggatctgcagtttgaactggtagagcctttgaagcagctcttcaaagacgaagtccgcgcttgcggaatcgaactgggactgccgccgcacatggtatatcgccagccattcccgggtccggggcttggcgtcaggtgcctcggcgcaattacaagagacagactggaagcggtccgcgaatcggatgccatcctgagagaagagtttgagaaagcgggactggataagaaagtatggcagtactttacggtagtgccggactttaagtctgtaggcatgaagaaccatgccagatgcttcgaatatatggtaatcatccgggcaatcaatacgatcgacgcgatgacagccagcatcgagaaggttgactgggacgtgctagagaagatcacgaacaggatattggcggaagtggagaatgtcaatagagtatgctatgacatgtcgccgaagccgccggctacgattgagtttgaatagttgacgctgggctacaaagcccgtaaccacggggctttgcggctttgggtgtttgaaattgcattatcattgcatttttatatttctttgtgatacattgcagtatgctgattactggtataattagcaatactttgagaagctgactggtagctgagaaccccggtcagcttctttgcaatctcaatattggtgtttggatacagatgaccataagttcctagtgtcgtctgtattttttcatgtccaagacgctctttaatcagcagtggattttcgcccatgctgataagcagggaagcatgcgaatgtctcagggcatgaattttgattctgtgaacaccagctaaatttgccaatttctccaatgctcttggaagtgttgttttgctggtgggtgtactgttataactcaggacgaatccacaatttggtaaaacctttgcctgaaccgccttccattcttgtaattccttgatggtatcagcatcaatataaatggtacggttgcttgcctgcgtcttaggttcaacgaatttgtagtcattcattgttttatagtacagtgttttactaataatcagcatacctgtttcaaaatcaatatcatcccactgtaaggcggcagcctctccaatacgcattccagtcataaataaaagccagaacgagatgaagagatagtgctcgtagtagtcacctttgtacagcagggatattaccttctgaaactcctccaaagtccagaagtcgatctttacttttttagatttgatattgccgatcatgcgggcaggattcttctttgcaagtccgaggataatcgcccggtcaaaagctaaacataacattccctgaacaatgcgtacatagtttggactgaattgttttgccaacttgagctgccaggtctgtacatttatcgcttctatttcggacactttcttcttgtagaaataggcaaagtgtttttgaatggtcgagtaacgattcttgtaggtactttctttcacctgagttttgtaccacggaagatagatttcttcaataaactttttgaaggtaatgtcttccttcttatcagctaattcttccgttgatgcaagaatcaatttggaatactcggcacgggcttcttttttggttgagaatccgctgcggtatttttgaatctgttttccggttacaggatgatatccgagattggctcgaaaataataagtgccgttttctgcttttttaattggatcttttgccatgatttcactccttactaaaatgcaaaaagcacgatcattcttgcttatcgggcaaagtaatccctaataattcttcaacggcttcttttggaaccctgtctaattttctggattgataataggtatgccccttttctaccataagttcctttgctttttttataatatcagcagcaaaggaaggaccgtagcctaattcaatcaaatccctttttgttacagttatcatgaatctcctttccacagacagggaatcaacttgatacctgtctattattatatcaaattttgagtaaaagttctctaataaaagcgctataagctaaaatcccaaaagtctatgttattctttcagaagccagttcctatgcccgttccggccacgtaaaacggtgttactttgtaactattaagctgcaggcgtgcgaagatgcaaactatctgcagtcacctatatcaatctcccgaaagatttcttttgttttcaaggtacggcgaatggatatattacccattcaattaaggaataggggacttttctttaagattgaaaaattttgagaaaaaatgataaaaataaaagctgccttgatttggcagctacggaaatctatttgcgttttagagccagacgattcagcatggaaatgagcgcaagcatatcctcgtcatcgagttgtttcatcagatcagttgctttgtcaatcagaggaagattgtgcagctctgaatcgaagaactgttgaggagtgacttccagatagtcacagatatccagaaagctctgcatggtaggcagagaacgtccggaagtgagggactggatgtagcttttatttttgccaagatccagactcatctgatattcagatacatttttctttaaacgcagttcgctgatgcgttctccaataaagtttttatccatacatttacacctctcttccacattttaaactatttacttacagcaaattacggaataaaatagagatatatttgaaatatagtgattattccgtaatataaccgtaatttactaaaatgatacaaaaaaagaaattatggatgatagaaaatggattttggggtatgatgatagcaaaggaagtggatgtctgtgcggattataggaaatgagcaggaaattgaatgggcgaaggaagcactgcggaatcaatgtaacgattgtccctacttggactgctgtaatgaaaaggcgaaagaggagtcaaagcagtgtggaacggttcggtttggctgccgggagtatctgaaagagaagattgaattcgtagtagaaaaatagatgtagtattttgaacaaatataaacaccatatatagtataagcctgaattgacatgaggaatatcttgtgctagtatactgatatagtttattttatgcacaccctttttggggagtttcgggattcataagaatctccaaacttacaggaaacagcaggagctgattcctggcataagtagtttatgtttgtagtgagtgtcacggtatgccttttttggctgcgtggcacttttgttttttcaggaagaaaccagacttttaagaatgaacagagaaaagactctcttttcattctttttttgtgcttacatttaggtttcggcatagttgcatgccacaaccagcttcggctgttgatggataaatattattttaagaaaggtggaataagaacatgaatgaagcaagagtgtatgcagatggatttgagagatcctttgcagaagtaaaagatctgctggagtttctggcagagagaggaagaaatgccaaatggatcagaaagccaacgaatacgttacggctggcaccactggaaaaggaggctcaaaatctggatgcggcagatgcatccatggaagaaattttggaggatacagagaagaatacgcagcttgtactgaaaatgagaggagaatcctatccggtacgtgactgtgccatccgcaccattttaagccgcgcaggtgtcaatggagacgggcttcgcaagctggataaggcaacatatgcgaaggtagtcaattactgcctgcgggttgcaaaaggggatgccctgattaagattgcggacggaaaggtttccgcagtacatggcggggataaacatgattattgcatccttgatatgaaagccatgtttgagacaacctgcgaatatctgaatctgaatttcaaaggcagtgtttacatggagggctctggtatctatgaccattccattgtatctgccatgtggaagctcggaggaagtcaggaacttctggatacttaccgaaaagcactggatgcacacggaatggatgagaagatcctgtcaccggcacttcgttttaccacatctgacgtggcagcgagcggtgcaaatctgtatccgatgcttttgacagacggaccaaacggcgttatcagtctgggaagtccaatcaagctggctcacgataaaggggcaacgattctggacttccggaaaaatctggagcaggtatgcgcccgctatgtggatgcgatgaagaatcttactcagcttatggacattgagatccgtaatccggtgaactgcctgaagctgctgatgaaggaacttggcattaaacagaagatccggaatgaggtggtggagctatttgtatcccagaacggggaaggtgcctgtacggcacatgatctttattatgccatgaatgaagcctccttttttgcagcctgtgaaggaatgtccggacagggcatcctgaagctggaggaggatattacgaaggcgcttataaaagactggaaaaaatatgacgtttatggagcagtcaaatgttaggaggaattggaatgaataacaaagcagagtatacaccggaaaaggttgtggatatcagtaacctgtcaagagaagactggttggaataccgcaaaaaaggaatcggcggcagtgatgtagcggcaatcatggggatctctccatttgccactatccgggatctgttttacaacaaaacaggtgtgcagccggtcattcaggaggaagaggaaagcaactgggttgccaaggaagtcggacaccggctggaagatctggtggcagaaatcttttccaaaaagaccggactggaagtatttccggtacgtgtcatgttccggcatccattatatccgttcatgcttgcagatgtggatttttttgttcgtatgccggatgggacatttgcgattctggaatgtaaaacttgcaattataatgcgaaagataagtgggctgatgagggtattccagctcattatgtgctgcaggtaaggcattatctgtctgtgatgaatatgcagaaagcctttatcgcatgcctgtatggaaataacgagaatgagtttgtgtatcgcaccattgagcgtgatctgattgaggaagaagacatcattgatcaggaaacgtatttctggcaggaacatgtattgaaaaatgtagtaccgccgcataacgggaattccgatctggttctggcaaatatccgtaattatggtggttttgcagacaaatctattccggaaattgtgctttccggtctggaatcaaaaaatcttgagaagtatcttaccctttcggaggaaaagtcacagttggaaaaacggaaaaaggaaatcgaagcagaacagcgggcaatcagtgttccttttgtggaacagctggggcagggctgcaaggcagtgctggaggacggtacgaaccgttaccgtattacctataatccgaccagacgtacttcggttgggaaagaccagatggagaagctgaaaaaccagcatccggatatctatgaggaatatacaaaaacaacggagagccgtactttccgaattaagaaggaggcggcgtaatgagaaaaccaaatgaacggatgcggataaaaagctggagggatataaacaatgaggtgcagatttaaacataagattttccagaatgaggagaatgggtatacgattgccatattcaccacacaggatacgtctgtccccctgtcagccagagacaaatatctggcatcccggaatatcatcggcttctcagtgattggattcggtcttccgcttacagacgagattgagcttgagatggaaggcagatgggagagcggagagcatggaactcagtatcaggtggaaaatttcatggaggttgtaccacggacaaaggagggtatcttaggatacctttcttccggtgcaatcaaaggtatcggtcccaagatggcagatactattttccggaagtttgggcttcagacactggaaatcatggaaaacaacccgcaggaactcttgaagatccgtggaatttccgagaagaagctggctgctattgtggagtcctatggaaaaaaccaggtgttccgggaactgatgacgtttctggcgccttttaaggtaacacccaaaaaagtgaatatgattctgaagaaattcggaaatgaatcggtggatattatccggcaccgcccttacatgctgagtgcagtcaaaggcttcgggtttctgactgtggatgcgatcggaagacagtgctgctgtgcactcaatgatcccatgcggatatccgggtgcatcggacatatcatgaatcaggcaatgaaagaaggacatctgtttaagcagcgtcaggaggttatcagggaagcactggaaatgctgaaccgggatctgcaggtcatggcagtatcggagcaggatgtcagtcaggtgctttaccggctggtgctgcaaaaaagcattgttgtggaggaagaacggatctattctatccggcagtatgaagaagaaacacagaccgcttccatgatagccagacggcttttggagaagccggttttgctgtccattgaaccggggctggaaaaggcacagaagacactggggatcacgctgtcagaaacacagaaacaggcagtgcggatggtgtttgcacatcccatcagtattattaccggaggtcccggaaccggaaagacaacggttctcaaggtgattctctatatccatcaggcgttatgcaggtcagaggtacagcttatggctccgaccggacgtgcggcaagacgtatggtggagagtaccggctgtgaaaatgcatccacgatgcatctggccctggggcttttgggagatgatacggattttgaaccggattttgagtacctgtctgccggatttctaaatgtagatgaggtgtccatggtggacatgcatcttgcctatgaatttttccggcgggttagcagacatgccagagtccttttagtcggggataagaaccagcttccatccgtaggagccggggatgtgttccggcaactgattgcctgcgggctgattccggtcacggtactggatctggtttaccggcagggcgctttgagcagcataccttataatgcaaaactgatgcaggagaataagactaatctgagctttggggaggattttcagttcattgcctgtaaaggagcagatgaagcggcagagattgtccggaggatttatctggacgagattgcaaaaaacggcatggatcaggtacagatcctgactccgtatcggaaacgcagtgctgccggagtggatgaattgaacaaatctctggaggattttgtaaatccgccaatcgcagggaagaaggaactgcatatcggcagtcaggtgttccgggttggcgataagattttacagaataaaaataccgagatggcgagtaacggcgatctgggcaggatactggactgtatcacggatgaggatggaaatgccagggcagtgatcggattcccggatgggcggcaggtgcaatatgaagctgaccagatggaaatgatcgaacatgctaacgcaacaaccatccataaggcacagggttccgaatgtccggttgtcatcatcccttgggtaaaagccttttatatgatgctgaagcgcaatattctctataccggagtgaccagagcgaaaagcaaggtttatctggtaggggaatgggctgcagtctgtcaggcaatccatacggatgacagcgggacaaggaacaccattctgagtgagcggatcgtacagtattacgatcagtatcagagtgaacagaaaccggaaatggagcagttaaaacttgttgtttaaaaatatttttcaatttttgaaataagcggactattactcttatataggggaacgtctgcttttctaaatgaaaggagcagagaatgaaagaattattgtataagaaatcagaggcagttgccgctttgaaccgtgtggatggcttccatccgatggaactggcaagaaagattggagaagaagggcaggaggagcagctttatctggatgtgaaataccggaagctatggtttcgtctggtcaatccggcaggaaagatcatcagccggattatcactttcacagagaacatggcagttgtggaagcacgtatctatctggataaatgtgatcaggaagacaattatgtagccaattccttttcgcagaaattccggagcgatgacccgaagtttggagacaaatttctggaaatggcagaaacagcagccgtaggaagggcattatcggatgccggatatggtgtgcagtttgcggatgtgggagaggaaaatgatcctgcacaggtagatgccggaattccatatcagaatccacagatgccggattcaggtgccatggaaaatgcagccatgccggattcgggtgtcatgccaaatgcccctatgccaacttatggagagatgccaggtcagccggaatatgcaggccagcagatgatgaatcagttctatcagcaggcacaggcggcgggaagcaccatttaccatggcagtggacaaatgcctggctacggttccgctccggctgcctctacgccgccaaagaccggacagatgctgcagggagcattacagaatctggatacgtcccttccggtagaagaactgatgaaacacatgaactatgaaatggcagtcgggactgtgattccgggaaagggaaaatacggcggaaagaccatgggacaggtggcagttgaaagcccgtcaacgatccagtggtttgccgagcaatattccggaccgaacaatctggttccggcggcagcaaaggtaattttacaaaaagcaatgccgatggctggttaaggaagaaccccgcagagagcttttttctgcgggggaaaggaggaagagaccgggatgtattatgatatgtctgggtttgattatggaatactggatgtggtgcaggtgctgcatctcagaaagcggcggggaaactattatgactgcccgttttgtggagagacgcatggaaaactgaatatcaatgtggaaaagaatgtattccggtgcaaccgctgtgatgcgtccggggggatgctgaagctttatgcggatttgcacaatgttacactctccgaagcaaatcagcagatccgggaagcattaggaaaaggagaataccggacggattatatcaaagcaacgccggtacaggaagaaaaggcaacggcagagcttgcacccatagaggaaatccaccggacgtatcagagaatgctgtccatgctcacgcttaacaggaagcatcaggaggatctgcaaagacgaggattaaaaccggaacagatcgaagcacagcgttaccggagtgtcccgctgtttggaatgaagaagctggtcaaaaggctggcagaagaaggatatatggtgaaaggcgtgccgggattctaccgggatacagacggaaactggacgattaacttcaaagcagaaaactcaggaatcctgattcccatagtttctttggacgggttcatccagggttttcagatccgggtagatcatgtgactgacacgaaaaaatatatctggctgtccagtgtcaattatgaccagggagtttcctccggaagtccggtacatgtgatcggtgatcttgccgcagaacgtgtctatctgaccgaaggagccttaaaagggaccatagcccattatctgtccggcgctacctttgtgtgcgttgccggagtgaaccagtaccggaatctgaaaccggtgctggagcggatgaaaggatatgggatgaaacagcttttggaggcgtatgacatggataagaagatgaaagtagcctgcaataagcatgacagtaagtgtgcggtctgttttgagcgttcccctgttatctgccagcataaggcggagaaacggaggattatccagaacggctgcaataaggtctatgaaatctgccgggagctttccctgccgatgaaccggatggtctgggatatggacgagagcggggagtggaacgggaaacacaaggggattgatgactatttagccgccatcaaacagaaggaaggaaccggggcacagacttcggctcttccgaaaggagaacaatcatgagaaaaaaaggaaatacggttcttgcaggactcattatctgcctgttgcttgtttttctcgcagcggcaggaaaactctttggtgcttatctgaagtatcagaaaggggacgtaagttacgagaaactgcaggaatatgttcaggaaccagaggaagaagaatcaccggagtctgagaaagaaaaggaggaacctaagaataggtatctagaaattgattttgcaggtttaaaagcggttaatccggatgtcatagcgtggattcagattccggcactggatattagttatccggtggtacaggggaaagataatgcatattatcttcatcaccttttttcgggagaatccaatatcaacgggagcatctttgtggactgccataatcagccggactttacggatcagaatacgatcgtgtacgggcataatatgaaaaacgggagcatgttcggaactctggataagtaccaagacaaagagctatttgaacaacatccggagttttatctctatttgccggacaagatcctcaagtatcgtatcttttcctgctatgcgggaagaaccggaagtgagggatataggtatcatttcccggaagcggaagattttcagacgtttctggatacggtgtcttcttatagggattatgataccggcaccgagctgtcggcaacggatcggatagttacgctgtctacctgtgtcaattccagacggaattatcgctatctggtacatggaaaattaagcagtgagatcatcacagaggaataaaagaatcgtgctggtgtgagaagaaatttcttatgccagcttttattatgggaggaaatgtaatgggaacagcattggttatggaacatgcaaacgcactggcacagatgatagtcagtgaaaaggacaagttatttgatgaaagagtggaggctcttgtaaaactttatagaagggcggaattttatctgaagcagggatttctggagagcatcgtctgcgagttccatcggaagaaagtggaaatgattatgcaggcggaaacaaaaggagagattacggaaatactgaagttatcaaaaccgcattttgacgggaaaaaatttgtctatacctctccgtatgctgtggaagaggaagagcttctcctttggtctctgacatcactgcaaggtccactccgggatgaagggtatcgaagatatcgggaattatttgagaagtgcctgccggaattggtggaaaagctttcagcataggacaatgacagaacaaaagaaaaaagatactaagcatttttgagaatggttggtatctttttttcttagacaaactgttatttgttacttaggaaccgaccgttaatatccccaagtcattaatttccacgttccgccttcgctacgcgccaaccaccatgaccatgtgtattcttcattagcgttccacgctccacctccatttttaggtgacctgaaactactatcaaacgaaatacattgtgtgaaactctctttattgtcatttgcttcctccaattcattcatccaggcaatattatcctcattattgcacgcatcatcagatgtataagataggctgtgcaattcacacccctcaaaagaactaaattgtttctttataacatcaatagcttcatccatgtcatcttttgtgtatatagatgatgtcccataatcaataactaaattttttgtatttccttttccacaaccagctaaagatataacaaataaaagacaaagaaccattgctatcaatcttttcataatcactacctcttcaaattcatatttttttgctctgtcattcatcctgaacaactggaactgttagtcgttatctttcgttctgcgttccattacaaactgctctaaatttattctgtgattatactttatggatgcatccttatccttagagagtataatatcattcatatcaattccatttaatgcagcaatcgcaatagtgtagtgtaccacatcggctaattcgttacctaattgggtttgtaaatcctcttgaccaacagattttctacctgcctttttatttagtacttctgccacttcacctatttcttctacgagtttcataaacaggctttggtcaatcccaccatttttataatggtcgaataagtattcttgcagttcctctattgtaattttcacagtatcttttcctccgcaaattcatatttgataatatgttcattatactgtgttttaccaatgatatcaacgatatggaagtatacaggaagaaaaattatggaaatagtttttaaaaagttgcactttaagtatctcctacgtacagaataagtatcaagtacaaaggagtgaatgtagcatgataaaaaaattaagagtagccgtggatcacgggaaccggaacatgaaaacctgtaattttgtatttaccactggactgacagaacaggacaaaaagcctgccaggggagagaagtatctgaaatatcagggaaagtattatacccttagtgagaagcggattccgtaccagagagacaagacgcaggacagccggaaccgattctggattctgaccttatttgccattgcaatggagctggagcagaaaagccagatccagccggaggatgtcattcaggtggaacttccgattgggcttccgccgaagcattttgcagagctttgtgagagatatgaacgctatttcaaaggggacgggaaggtgcaggaactgtgcttcaacgataaagtctatcacctctgtatacagaatgtaatggcgtttccgcaggattatgcagccatgatgacgaggatgatggaaatccgtgagattccgaaagtcgtagggattgatattggcggatttacttctgattatcttctgatgagaagtggcagaccggatatggattattgtgattctctggaaaaaggtgtgattaccatgtataacgatatcatttccagtattaacagtgaatatgacatgcttctggaggaggcagatatcgacagtatcatcaagggaaaaacgcagtattatgaggaagctgttgtacaggcagtagaaaccatggttcagaattttgttaccgatcttctgaacagcatccgagagcggggcattgatacaaaatctacttatacggtgtttatcggcggcggagcagtgcttctggaacgatttctggagcaggcagaccggttgggaaaacatacctttatccgggatatgaaagcaaatgccgatggatatgatcttttgtatcgcatgacacaggctggagtgtgattttatgggaaagaaaaatccgtttgtattcactattggttttgataagtcggatccagatcacgtgtatgtgacagaacttctgaatacgacagagaaaaaagcaaaactgatcgttgcggcaattctggcatatacgggaagaacggatgagacaggtaatggcagtataagcatggaaccggatatgctccggccaatgatgcagcaaatcatccgggaagaagtaagaaaggtattggaagggcaggacgtttctaagataaatagagaaatgcccacagaagttgatttgatggaagaagaaccgctgcggatggatcagactatgagacagaatgtagtggatgctatcagtgcatttcgcagggcataaaaaagcaggagagatacacatgcttatggcagtgtactctcctgttctttgtatcagaatgggaatagacagaaaactcacagactattcacagattactcacagattgtctttgtataatgtgtagatgatgaaggatacgggagagccttaacttaggttcttgaatccatccagaagtccacgcagtgtagaaagggcaagctgtttctgctcctccgggcaggaatttagttctgccatgatttgctgcatggtagaatccgggttcgttttctggttagaaaatatagcatctatggaaatatgtaagtaagttgccaaggcataaagtgtttccaactgtggattgccaatatagttttcaatatcagagacagtccgtaaagaaatctttgcctgttccgcaaggctgttttgcgaaagattgcggcggagacgttcttccctgactgcatctcccaataattttttcaccatctatatcacctcacttaatgcatatattttatcgtagattaacactatacgaaatgcgttaaagtgcgttatgataagcaggataacacatgcacaaatagagaaacatggaagtaagtacgacagacatgaatggacagcataagataaaagccaaagaggaactgaatctgttaaaaaaatcttatccatacaatgtgtcggagagaagttagaatatgcagtatatgagatactatcatcgcatatcctacacaattacatagaaagagaagtatcggctggactacgaatagagtggtccagcctttctttttttcgaaaaaatgaaggcagtgtcacgttttgttgccgctcaccgccatcctcggaattttttggaacgtgataaaaaatttcggaggataaaacaaatgaacaaaaaaacatatacaggatcaaagatacaaaatcactttacagcatatctgatacagtttgtccgtggaaaacgacatgattatctggagaagaaaatccagatggctgatgcagaagaactgttggaggatattggacagatggaggcaagaattgtaatcgaagaattgctggagaaccaaacgagggagcagcttttattgcaggaggcacaggggaaatatccagaatggaataagatgtcagatgaaagactgatgaaagcgcttcatacgctgcgggatgaagaacggaagctgatttaccagcatgtgtttgaagaacgtacttttgaggaaatgagcaggctaaacgggttatcagaggagcgatgcaagggtatttattattatgcaatccggaagatccgcaaggtgatgggaggtgaaaactaatgaattttgaacgattacttttaaaggcaaaagaaggaaatgcagatgcggtactgaagattttagagatatataagccgcttttaattaagaatgcgattgtgaatggcagatttgatgaagatctgtatcaggaactggtaagtacattgcttcagtgtatccagagattccagataattgagtaagttatcttaaacaaaggctgcaatcactctcaggggagtaacatcctctgggagtgattgttttttgaagggtgatattgcctcagttcgaagcggcagacggtgttgatctattatgttgcctgatgctttaatgctcttttgttgttgccagttctttatgaagatgtagagccataaacacagtaacaatagcagaaattacatcggcaatcggttgtgcatatagtattccatttatgccccagaatgatgggagcaacagaatgatcggaacaaagcaaataccttgtcggcaagccccaagaacgaatccggcggtgccttttccaagtgcaagaaacagagaagaatacactgtgtaaaatccaaatacgaagaaggaaaatccatttgccattagcgatttttgacctacagaaatcatctctgtattgccttctgtaaattgcgaaataatctgtgtggaaaatagggctattgtcaatcccacaactacacaaaatattgttgaccataagatagaagttttaattgcttccctgagccgatcaaactttttggcaccatagctaaagccggcaattggttggaaaccttttaagaagccgaacacaaccagagtttccattgaagtgattcttgtaacagcgcccattccggcgataacagcatctccatagatattagcttcccggtttatgaatgcgatagaaaggcttgtaagaagctggaaagtcaatgtgggtataccgattttcagaatttcagttatgatctgcttagaaggacaaaattccttaatggaaaatgtaaaagcgctttttttctgtaatgcataaattaaatatacaagagtagaagccatttgagaaattgctgtagcgattgccgcaccagcaacccccatgtcgagagtatagatgaaaataggatctaaaccaatattcaatacagctcctaataataatgcacacatagttgtttttgcggcgccttcacttgcaacgatattgttcatcgttacattaaatacattgaaaatacatgaaataacatagattcttccataagaaagggcgtatggcataatcgtgtctgttgcacctaacatggttaaaataggtttcaaaaaaattgcagttccgataataataactgcgccaatacaaacactgctgtataatgcagtactggcgactttacttgcagcttccctatctcctcgccctaaaagtcttgataagtaggaggcggcaccattgccaaacatcagacctaaaccaacaactacttgtcctaaaggaaacgcaatggaaattgcacccatttgactctcgccaagtcctcctatgaaataagcatccaccaaattgtagagagcgttaataagcataccaatcattatcggtataccaagagccattagtgcttggggaacaggtgcatttcctaataaatccattttgttgttattcttgttcatttcaaatactcctttcaattaagaatataaattatagtagtataaattatagtatactacgtgagagaatactactataatttatagtagttgtcaagcgtgtatcctgcaatttccttgacaagaggtataaaatcaaatactataaattacagtatatataaccgtaagtattttatagctttcgtggatatagaaagtgggtgaactatggctacaatagatttaattgtgttaggaatattgaaaaaggaaccgatgggagcctatgatattcaaaaattagtggaatatcgtaatatatcaaaatgggtaaaaatcagtacaccatccatttacaaaaaagcaattcagttggaggaaaaaggcttcattaaaggagaaattgtgaaagaaggtaagatgcctgaaaaagcagtttattcattaacagatgaaggcgaaaaagaatttgtaaagcttatgatggaaacagcctctaaacccattcacttttttttagattttaatgcagtaattgtaaatttggataagttaccgcctgaaagtcaacaatcatgtattgccagtattgaggaaaatattgaaatattaaaaacttatctggaggaaaatcttcgagagaaagagaatgatccggaaatccctaagactggtatggcagtattgcaacagcagatagttttggcggatgctattgaaaaatggattatttctctaaaaaaagacttttgatgaagaagtcactagctgatttcttattaggtctgcaggattgggaagaaacagggatggatgccgacctatgttccggctttgtagccagaacatagaaattttcttagtggggaatctccctcaaacccggtgctccttatatcctgcagattaaacttcaaatttatacccatatccaactactgtttttatgtaattcttgtcgctggaatacttttttatcttcttgcgtatttgaaaaatagtgttttccacggcgtggaaataaccatttgctttttcatgccaaactgcttcataaatctgttgtttagtaaaagccatccctggattagaatatagcatataaagtacatcaaattcttttacagaaaagttaatgtcttttcgtactattaagccgtaggtcgtaaaggtctgcgactttaactttacccggaaaggagctgccacatatataggcagtgctgtaattttaacagtaacggtcaccaatctatggggatggcttgtatatccggctgaaatgctaaaaaatcagtggttcttatttatcacttcactctgccccggtaattatgtgtttgccgtttctggctcttgcagctattgcgattctactggtctattaccagactatttgcaggtaaagcattgctctggttttgaatttgagttttggcagtctaataatagcattttagattagctgtgataaggtgaaacagattaggaggaaagtaaattgcattacaaagacaaaaacctacagatagatattcgctgtcatactgtttttatgaatgatcaaaagattgaattgagtctgaaagaatttacggtactaaaatatctaacagaacatcctggctgggtattctctcacgaggagatttatcgtaatgtctggaaggaagaaccgattgactgtgctaatgcggttatgtgctgcattagccagcttcgtaaaaagttaaaagtagattcacggaactggaattacatccgcaccgtccgaggtgtgggctataagtttcaaccactctcaggggagtaacatcctctgggagttttttgtcatatttgttgcacttttcggctctggtacgtacagaaatagaaaagaaacatatcccaaaatgtatacattttagaagtacgttccggaaagggggattatatcttaaaaaggttacacacacagttttgagatatgccaacaaaagtgtggatattttgggacagggaaaggagaaatgtggatgcagatatatggatatcaccgcaccagtacaaaggagcagcatcttgatcgtggcatacaggaaattgagcggtactgtaacgagcatgagatggcacttacgaatatttttacggatcaggagacagggaagaattttaatcgtccgagatataccgttttagtggaggatgtcctgcggctgggagatattttgattgttacagaattggacagactggggagaaacaagcatgacaccatgcagcagatccagcggatcaaggacatgggagtgcggcttatggttttggaactgccgactacgcttatggacttatctgtgatggataatgcgatggcaaggatgatgctggaaacaatcaataacatgatgctggagctttatgcttctatggcgcaggcagagctggagaaaaaggagaagcgacagcgggaaggtatagaagcgaagaaattgcggggtgaatgggatgattatggaagaccaagcgtgatgaagcaggaaacctttgacgagaacttccagagcgttatttccggaaaaatgacaccgacgcagcttcggaagagtctgggaatgacacactcgactttttaccggtatcgtaaaactttttatgaaaaatatccggaactttccaatacctagaatgaaagccctattacttatatagaacaaagaatttcaggaggaaagcaatatgagtgaaaaaagaataggtactttgatttatgatccatctatgggaagatatgatatccggtttggtattgaatcctattatgggggactgcattgtggagactgctttgatgtgaaggtaagggatgtatggattccggttcggattgaaatggacgagaactggtatcttgtgggactttcgaagacacgcctcggcgggctgactgttcggatgtagaggagatagatgatggaagccaaaaagaaatatgtaaagcccgccttccgatttgtgacagatctggggagtattctggaatgtctgtatgaagtatatggaacggatggggagctgctgcttaaaggggaaaagctgtcagatacagtaatctgcccgtttgtccgcatggttcaaaagaaatgcagtgtggtggatgcggaaatcttgcatttgatgctctggaagatatatatggtaagtgcgaggaaagaagcatttgtagcggatgctaagaaagagctacatcccttatttgaccaagaaagatgaaaaacagattgacaccacatatgacaccacatatactatagataggaggcattaaagatgtcgaaatgggataaactattgacaagaatttgctcattatcgaaagaccttcgttttgatgaattaagaaaagtattagaaagttatggatatgagataaatgctccgagaagtgggagcagccattatacattccgtaaagcgggatgccagccgataacaataccgaaacacgaaccaatcaagaaaatttatgttgaaatggtaaagcagattgtagaaagtgaggcgaaaaacgatgaagacactgaatgattatttggcaatgtcctatcgcatggaaattgtggaagataaggatgaaggtggatttgtggtttcttatccggaactgccgggatgcatcacctgtggagagacgatagaaagggcagttgaaaatgcagcggatgcaaaaaaagcatggttagaagctgcactggaagaagggattgagattcacgaaccgggaagcctggaagagtattcgggacagtttaaaataaggatgccacgcagcttacaccgggatctggcggaacactcaaaaaaagaaggcatcagtatgaatcaatactgtatatatcttctttcaaagaatgatgcgctgttagtaaaataaatatacaagaatatagatgaaaagagccgtccttatgggcggctcgaagtattctttctttgattaaaaatgatattgttctagcagatagataggaagtgtttgtacattcccagcggttccgcctttggtatcacctttcagatatagtagtttattggccttcccctgttccaatgccttcaaggcagtagatgcagttcccttaccggctttaacttcaatcagatagcggatgtgagttttcaatgtctgagctacaaaatcaatttcaccacctttataagtagcaaaagccggtgtctcaaagataatttcttccgggaattcctggcgtttggacaagttaatgtaaacatagttttcgttcaatgagccatccatagttgatacagtagcaccagttctggagagataataatatgcaactccaagatccatgaagaagcagcggcttcccggtttgaaattcaggatgtccagttctgtgattttgccacagaaaccgatgattccagaatgataaagccagttgatagcacgatagcaggttgctttagaaagattactggagtaattctttgtaacgagcttttgcagttcttcacttatactgtcctcatctaatcctttcttttcacgaagcagaatacggcagatgcttaaaaagatgttggtaaaaacactaatatctgtgatgtcatcaaagtaccgcatagattcgtttaagaaaatgcggatgattctaacaagctctttttgagctgcttccacgtcttttgtgttaaggtatgtttccacaacctttggatagccgccaatctgtctatagatgtcgtaaacattctttaattcgtcatatagttccggtacggtgtcatctgcatgatccagtggaagtgatagatatttctgaaaaagctggtcatccaatgcttccaaaaactctttaaaggaaagggtataaatacggatactggtaatatctccactggagaatttgaattccggttccagtacacgtcccagataacttccagttacaatgaaatgcgcttgaaaatagcgggtaaattctcggatacggttgaatatctctgaggattcctgaatttcatcaataatgatgactgtatcgttggtatcttcaaaatccggatcgaagagtttaaaagcatcgtgaagcggctgctccggtcgttttgtaccgggagtccagtctgtggcttttttgtaacattccataaattgtttgccggacaaatcaaacaggttaatgtagatcttgtgcctgaagttctcatccgcaaatttattgataatatatgtttttccgacctgtctggcaccattcacttccaaggtgctgtggacggtatcgtttttccaatccagaagctgatcgtaaacttttcttttcagatacatgggaaatgctcctttctttcaactgttcctattatatcaaaatatgaatggataatatagagggtaatttctgataaatgatgaattgtctagtctgagcagttcttcacgggtattccggtttctgtcattactttttcgtactgaagaagctgttcccaggtcagccattccggtttctgatctgtgggaaaaccattccataattctttcatacgggcaatatggttttgaacgctatgattgcataggatagacggactgcgatttccgtagcccagatagtattcacagtcagactgtaatttacttaacatccggtactcgaattcataggaacttctttgatacggagccggatgaaatgtgtactcctgctgtatgggatgggaaggttctccatcaatatggttaaaagataaagaataaagattcggttcaggctctttgccaaggtcaatatccttccacaactttccgaattggtccttatataccggacaggaaaaatcatccatgccagtatactcaagcactaattttgtttttgcattttcattcattctattagaccatcctttcctttattgcagacattgaggtatattattgggcgctgtttctgcattccactgcagcttcgcacgtacatccatcaggatgattcctaactggttttctccgcagttattgactttgccccagaaatagtcaccccagttgtttccttcaataagtgtggactctccggttgcaagaagtttatcccggagttccgggttctgcatgaatttgcacatgcagatttcatacatgagccggactttcactttttcccagtccgggcgtaatgtaagatctctgccgagtttctttgcatcagaaggattatgcatccgaaaaatacagaatttgcgttgctctctcgcagagagtgttttctgcgcttgaaaagcagcttcattatttgcataggtttgtcccatgtaagagaccggtgccggatagaaattgcttagaaaagcataatctccccgaaattcattgatctgtgtaggtatgcgcttgcttgtatttgtttgattcattataaattcctcctttgtaaaagaggtgcggcctttcagccacacctcaaaataattctcatctattgcagagatggttatgcaatcatctccaaaaattcagcttctgtaagaattggaataccaaggctctgggcttttgccagtttgctgccggctttttccccgcagatcaggtaatcggttttctttgttacagagctgccaggtttggcaccaagctccagaatcttatcgttgataccgtctctggtaaaatgctccagtttccctgttgctacgatggtacatcctgtaaatttgttttcttttgtcataatggtctcttcctttctttgttcaaatgtgaattcgttctgtaagtttttccataaatcaagatttgcttcatctgcaaaccaggaatggatgttgtgatttaagatttcgccaaaatcctctaactgagtgaagtcgtaatctccgacagccgcctgttcaaatgcagttaaatttccggaaaatacggtgtccagaatccggcttttggttctgccgatcataggaatatccatggaaaccagatagcggacaaagctggtcctccggctggcgttgatggattcccacaagcggtcgaaagatttctcaccatatccgtccagtgccacaatatcttcccggtgttcctccagatgatagatgtcctgaaaagagtgcagatagcccagattcaggaatttttctaaagtggcttctgacagtccttcgatgttcattgccttcttgctggcaaaatggacaaaccttcttgtgatctggctgtcgcactgcggattatcacaatgcagagtttctacggtgcgaccgtcgctggtcttacggctgtaggttctggttttggaaccacagcaagggcagaccggaggcgtgatgtcggtataccttccacgatccagattatcctctatatgtgggatgatcatgtttcgtttggaaacaagaatccggcatccgggtacaagctccagatttttgataaaggtcagattatgaagggaagctctggaaacatcacagccgtcaatctccacggtatcgaagatgccgaccggagcaatctctccgaatctggtcggtgtccattcaatttcacgcaagaaagtttcgtaggtatcatcctcaaacttataggcgaggccgtccttatagtggtgtccggtttttccgcagcttttggagtagctgagactgtcaaaaatcatgacaatgccatcgataggaagatgtaaatttgctgctgtggataccaattcctgaatgaatttctccgcatattcttttgaaagtccggttcctgaaattgagaaaaacgggcagtaaccaaagcccaggtgtgttaaaccttctaatttgcaggctctgctgtccgggaagggaacatcctccattccttctaatacattgaacggaagaaagcgaacacaacgtccgatacagttcttcggatcaagacttcgtactgatccggaagcaaaattacgtccgtttttataaggttttccatttccatcacgcagagtatctttcagacgttcaaaatcattggttggtataaaagactcaccggtaatgaccagacgttctttgtgtggaatggtaagcggtacatttaaaaatgccgggatattgtgtgtaatatcttcccccacttcaccatctccacgggtagaagcctgaatcagtctgccatcttcgtaaatgagtttggtagtcaaaccgtccagtttcagcataaagagaacttcctgtcctttcatgaaatctaaaagctctgaaatcagttttgttttctcaagcgagagcagtggaatcggatgggtgactttggcaagttcactgaccggataatatccaaccgtctgtgtcggagaatttgacaggatgaaaccagtctgttcctccagttcattcagttcgtcaaagagtcggtcatactcggcatcagataccagaggggcatcctgattgtagtaggcatgacggtattcattgagttgttttacaagattcttaattcttttgactgacatagagtctcctttcttttgtggcgtgccagttccggaatcatttgtttccgtaatcctcctttccctgcgttcaggcataaaaaaagagaatgacgcttatgttcattctcaaaatagatgcagtttcctgcaaaataaaaaaagccagaagtccctgctgcttgttgggcataggaaaactcctgactacgtttcaaacctaaactgcgtgtgataaatcctttccggattgacacaaataattgatataagaacagtataacactagatgtagtatatgtcaaatgaaatagattcctcaatgaagcttttgccttatgttgatgacaaatttgtcggctacaggaataaaagcgttcaggatttcagatttgccctaagcgaaggaattcgtagccaggtattttttgccactttcgtggagaaagtcgaaaaccagataaaatcaatctctgtcataaatgcctctaaactgtttttacatcgtagtggttatgcaagttctaaatttaaaaataattttcacgaataactaacttttctatatgctgaattgtcataaaatatagattattaaatttgaaagcagattgaaggtgataaacatgagaagttataaacggtataccaggcgaaagagacttttgaagcaaatcgctgtggttgctttatctcctaatcgggtattcacgaaagaacagatctatcagcatatctatgaggaagcggagtcagaagtgaataaccgaatttacggtctgattaagaacttgagaaagaaaatagaagaaaatccggaaacaccgcactacatagaaacgatacgtggtgttggttatcgctttcgggcataaaaggagccgtccggcaatgggcggctcgaagtgtttctcttgttgtttatttattgtttttttcgttgtatactgataaaacgaggtgataaaagtggcatatagaattttgatcgtggatgatgacatcgaattattaaagatgttaaagaactattttgaaatcaaacgatatgatgtaatgatggcagaagatggcacagatgctttggaaaaaatccataagaaaccggatattatcttgctggacatcaatatgcctaaaatagacggattagaagtatgcagacgtatccggggcaaagtaacttgtcccattatcttcctgacggcaaaagtggaggagcaggacagggtaaacgggcttttatccggtggggatgactatatactgaagccgtttagtctgaaagaactggatgctcgtattattgcacatttgaagcgtgaggagcgtcataaagggaagtctgaatacagattccacggagacctcagtattgattatggagcaaagagggttcagatcggtgaaaatgatttggagcttacgaagctggaatatgcaatcattgagtttttgtccatgaatccaggacaggtttttgacagggagcggatatacgaaaaggtgtgtggttatgatgcggaaggtgacagccgtgttgttacggaactgatccggagagtgagaaagaaactggcggaatatacgcagacagaatacattgagacagtatgggggatggggtatcgatggaaaagataagaaatttatccttgaaaaagacaatggttttatatacgatactcagcttgattgtcactttttttctttctgtgtcaattattgagattgccgggcagatacaggaggaggtctggtggaagtacgtggatcaggacgagtattatcaggcaatgaatgaccgcaatgaaaattttgaggtagtggtaccgagaccgaatcagagtaaaatgagcagaatggactggcatatttcagaaacctgtgatttccttcggacgtacggagtattgcttttttcttttgccggatgtggaattgcggtcagcctgttttacaaaaataaattaaagagaccgattcaggaactgaagatggcatcacagatgattgcggaggaagatctggattttcatatggcttatgagaacgaggacgagatggggatgctgtgcagggaatttgaaaggatgcgtgggcagttggaagaaaataaccgtagactttggcagatgatcgaagatgagcgggtactgcgtgcagcgattgcccatgatatccgctcgccgcttgcaatcatgcggggatatcaggaaatgcttttggaatttgttccggaagatatgcttgatcaagagaaaatgatggagatgttaaggggcggtatgcttcagattgaacggatgaaccattttattgatagtatgaggaagatgacgaaattggaagaacgggaattaaactgttccgtggtagatatccggcagttgataaaccagatagaagctctggcagaagtcgtggtggaaaaatcagaaaagaattttacagtgacgacagtgagagaatctgaaatactgactgcggatgaggaaatcatcatggaagtagcggataatctgttggctaacgcattccgctatgccaatcaggaagttaggctgaagctgacagtgacaccccaatatctgaaaatgagtatcagggatgacggaattggatttcaggaaaatatcgacagggtgacacaggcgttttatcatgagaatccacaggatgacttaaagcattttggaatgggtatgtatatcagccgtatctactgcgaacggcatggtgggaaactgctgataaaaaatgtagcagatggcggtgcggaagttgaggcagtgtttaaaaattatgtattagaagaacaacagcagaaataaatggctgttgtttttttgttgtgatttgtaggctatgctgtttgtagaaaaaagaaaggcgggatgacttatgaaagcaatcataaaaaggaatctgaaaaattatcttaaaaatccgatattctggatcggtttgattgttgttttaatcagtatgtaccagacacttgcaccctatctgtccattcattacgtgaagtcggatgaaaccttcaggaaggtaaaaatggcctccgatggggatgttatggagggatgtattccggcaacaccggataaggagagagaactgtgggagaaagagattgtaaagatacttcaggacacagagaatgggtttggcatgtcggaagtagaggcggaggcagtgatatctgagatgaaacagatgaagattacggaggcgtgtcagtatctgaaaacggaataccactttaatggtgccaattatgtgtatgaggacgtttcatggtatcagggaagcccggaggaagtcaaccggtatatcagagaaaatcttgagaaacatccattctcctattatttcggaagaaaatttacagattttgcaagcctgcatatggcattctttgcaacggttctgctggcgtttttatttttccaggatatgaggaaaaatacttatgaattgctgcacaccaaaccgatgacggcttttcaatatattgccgggaaaataagcagtggatttctcattatgacggcggcactggtcattatgaatatcgtatttatcattttgtgttacgccacggcagtaaaatcaggatttgctatgaacatactggattttgttcagaattcgatcctgtatgtcctgccgaacatcctgatgatctgctgtgtgtatgcggttacagcgctgctgtttaagaatccgcttccagcggttccggcgctggttctttatatcatttattctaatatgctgacatgggatagcaaaggacagtgtcatgcaagaccattctctattatggttcgatttccggggaatttttttgaaacggaattgccacatcaggtatatctcaatcaactgcttcttgtggcagcatccatactgctcatgtttatagcggtgtggatgtggaaaaggaggagagtatattgaagaaagaagtaaaaatatgtatgccatattataaaattgcatattcaatcgcttttgttgtgatattgagtgcaatccagcctgttgtatatgcgaatgaaatcgggcaggcagtagaaagagctgtttcgcttctggcagtcgttttctgtgcagatacttatctggtggaagtgcagagcaaacgctcggaagtattctgcctttataatctaaaaaagcaggcaggggtagtttataaaagactatttgtgcaggtagcttatctgattggaatcagtttgttggcatatggactcttttattggcagaaaccggtgaatctgacagaagaattagatggcggtgccttgtttggaatttattgtattgcgattcccggaactgttttgttttggagtgtgctttccgtaactgtcagcaatctggttcgaaacagatggattggtatgggtgtcgtgctgcttttctggtttttctctatttccggaaaggcaactcagtttttgaaaaactggggaccattttcctacggaacttgtgatttcggtaagctgacagagtggagatggcttggcgggaaggtgctgtgcgtggtatttgcggggatgatgcttgcatttgttcctaagatattaaagaagagagggtaagattatgagtataagaatagacgatttaacagtaacatttaaaaatggagtgacagcggtagatcatgtggatctggaaatcccacatgggatatttggtctgttaggtgaaaatggtgcaggaaaaacaacgttgatgcgggtgcttacaacggtgcttgcacccacaagtggaaaagttctgttagatggtacgctatattgcgaagcaaattacgaaaagatacagaaaaagattgggtatctgccacaggaaattgatctgtatccgtctttgactgttcgagaatgtctggagtatatgggagatctggctggaattgagaaaagagaaagcaagaaaaggattgattactatctggagaagaccagtcttgcagaccatcagaaaaagaaaatgcggcagctttcaggtggaatgaagcgaagagttggattagtgcaggcattactccatgagccggattttttaattgtggatgaaccaacaacagggctcgatccggaggaacgcatccgtatccgtaatttactggtagattttgcagaagaacgcaccgtattattttcaacgcatgtggtggaggatctgatggcaacctgtaatcagcttgcggttatgaaaaaaggtagattcctttatacaggaacaatgagggaattattgaataaggcaagagggcatgtatgggaatgctgtacagaggacgaaagccttgcaagagaattagaaagaaaatatcatatttccagtaagcagtatacggaggaaggaattagattaagactgttaggggagaatatgccgtcagaaagtggatgtatagcttgtgacgtaactttggaagatgcatatatctatgtaaccaatcgataaacattgttaatgaggagtgaaagctaaatgctaagaaaagcaggtgatgttatgggaaagtgatgattcttaccatttctgattccgaagagggaatcctgaataaaattaaatcagttctagcctgcgaaagtacgttagaagttatggagattacaaattctgaaaagttgacattccaaggtttggaaatagaccagcttcagcggagcgtaatcaaagatggtaaggttgtggaacttaccagacatgaatatgacctgcttttttatctggccttatcccccaatcgggtatttacaaaagaacagatttaccagcatatttatgaggatgtggagtcagaagtggataaccgtgtctatgggttagtcaagaatctgagaaagaaaatagaagaaaatccggaagaaccgcactacatagaaacgatacgtggtgtaggctaccgttttcgggcataaaaagagccgtccgattgggcggctcgaagtatttaaacagcagttttcttcactgcctgtttatagttaccggtagcatcgtaatctccagagaggagcagattctggcgaaattgctccagtttgatcttgaagcgtttcccatcctcaacagtcgtaagcatggtaagagcttctagcattccctgaatatatccggttagcaggtaatatctgcagggttcttccgatggtgagatattggacagggtttcttccagatgttcctgacgttccctgagccatgcatcccagacatccagttccaaatcagtcatggtgttcctcctttaaatctgatgataatcgtctttggtgtggaggggagaagtttcatgcacaagcatttttctgctccagatccaaatatggatttgtaaattcaaaaataataagttcatccgcatcgaacatgagctccaactcttttagtgtagctgctggatatccgcaatctctgaatcgttctaatacgtctgtttccgtttcaaatggttcaccgtcttccagcttttctccgattattaagccacatggagtcaataggctttcttcatataagcggacacaatatcggtcagggaaaaataggtgtgcttcatccgtgttataataaattcgttctccaggttctatgctttgcatcacaaagggaacatgatatgcagcggctatcgcctgatatgcttcataaagtggagtccatgctgtctctaaagaaagtagaatatacgtatcattccattccatgtagctgacatttccacgaagagatattccggtggaatctattttcttgtgggaaaataaattgccaatccagcataaatcaggattctggttcagaatgatgtaggtttccaggtcctcccacaagtcatatagtccttccggatttccttctgtataaaagatcacatcatcacagcagatatttgccattacacatccacctccgttccaaaagtttcacccatattctggttggaaaccgtaaggtttacaggggataaggtgccagaggcaagccattgttcgattgcatcaattacctgctccagcgtgtcgttataagccacattgcagtcttccagtcggagaaactgcaggtatgcttcatgaagaaggcttggatcatcacgcagcgtttcatatggaaggttgcagagtccgattctttcctccagacgttccatggagcggcggatgaagtcgcaggaaataaattgttcccggtagatgttataagcagcttcaagctggtcataggtcaaaataaatgagactttctcgcaaggattagatggttgttctttcatggtaaattcctccattcatactatgattggctggtggtacggattctctttgttcgggagtaagatgtaccagtagtttccagcgcaggtcgatttctcggtgaatccaggtatcattttcataaacttcatgtgtcaaaaaattgtaaattgtcggttctttttctatatcatccagatctgcgaccagacaagttgcctgattcacatagggccagagtgcctgttcgaccatatggcgtagttccagtatcagaggatatatctgtcctacatcataggttttggacatgcaggagctgattttcttcagcatcccggaagtttgtatcatctggttgatgacggtacattgttcctccacatctgcatccggattcaggaccagccggtggagcagcacagattttgcataggcagaagcggtcaggttgatgtttctgaccagttcttcatacggctgcttatactgtgtcttcagcacttccagaggcacatgttcccggttcttctttaaggtggagaggagccccgaaaggcagctctccagttcttccattcttgtcaagcacacatcgcctccagctccatcggaacacgggtgtagctgagacggtaaatactgttgcaggtctcaaataccacaccgttttcggatacttccagaatactctgcaccggactggtagcaaaggtctggttataactatagatccacgcccgttctcccagatggaggggcagggacaggattccggtgaggacatattctttcttttgggtggtgtgtaaggttatatttgtattcttcattgatttcacgctcctttccttacttaattttgtttgcaattacggcagcgaccagtttagcgcatcccaattccatctcggataaatgctgtccggttctggaacagagaagaagtgccagcggctctctgtcttcccttaaaatcgggaaaaaagcacaaaccggttgacgggtgttggataccgggtagacagggcagttctcagcagagatcagttcctggccgtccgcaaccaattcggcgagttcttctgtaacgggagtgccttccggaagatagatgcccgcagatacgagtatgtgagcctcactgcaaattgcgataccacagtggatgacactgtagaggacggaaagataggaagccatttcctcttttccgtttaagtgggtagggcatttgcgtaaaagcagctccattcccacattttccagttccagtgcatctccgtctgagagcttcatttgtttccggatttctgcagggatgacgatacgcccctgagagtccatggtccggatgagtgcaatattcataactaaagtctcctttcttaaaaagaggagaagcagtaaagtaccgcttctcttctgaaaatttaggcagcgtaaggcggagcctgtgctgtctgttgcatttgactgttctgctggtctgccagcatccgttttccgttattgatcagtgatgcagcaatcaccgtttcccagttggaaatataggaatccgtccgcttcagaagcgtgaacagatccatgtcggtaagctggatggctgtcgtcttttcggactggaagctgcgtggctgcatgtaggaaccaccgttcttattctgtgctttgatgcctttcccatttacaatctggattttccatgggcttttcataggctgccctttggaatcatagggatgtctggagatataaaacatctgggctgtggaataaccgttctgatcgggattgccgtagatcttgctctggctccattcaaattcctgaaaaccggaagtgatccgggttaagaggaactggatctgttccggtgccaggttgaaacgggtgatgatattccggtctccggtaccgttggaataatcctgaatggtgatgcagattaaagaatgtactttatgcccgttttcctgatattcccctttggcatgtagctgtgcatagttgccgagtggtgcgtagcggagccggtcataaaaggcaatgagtgcccggtcattctggatcttgcagatctggtcggtaatccggttttgataagtttcattcatgagtattcaccttcctttatttgagatgctgtttgacaagctgtgccatattctttggaagctcttccagtttcgtgatatccaggaatccgtccttgtaaatcctgcggatattttccttatcgtcaccaatggcagccgcaaacaggatgacatcccgtttttcgtattctttcttgatgccccgcagatctgcctctgcttccgttccgctgtagccgtaatcggctggctgaccgtcagaaatcaggatcagcagcttctgaagctccgggcgtgtgcacaaatgctctgctacgaagcggagagctgcgccgtcccggttcccgttgcggtcgcacatatccatcagccggtaacagtcctcattgtccacagaatcaaattctgcataggagtaaagagcaacgccgcctgcatccgtggaatgcccgtaaatggtgatagggataccgaggcttttacagaaatcataaaggacaatggcagtctttcttgcatgtgtcatccggtcaccccaacccatcgaaccactctcgtcaatcaggagggcaacagccagacgtttttcctctcctggaagtctggttctggtaaagatggttccgtctgtcttatagagagcatgggagtccagacgttttccaaacaggagattcttctgctttccgccttgctgttcttctttcaaaagcggcaggatggtgctttgcagctttttggaagcccgcaggagcgggggagcaactgtctggtattcattcttcaggtaatcggaaacactggtcaggcgatggatggtaacatggatgcctgcatgggcattgccgtaatgaatatcattggctgttttctgcagttcctcggtcagttccgtctgacagtcttcctgcaccttttctgcagccacatcgttcaagatccggaacagatcctctgcagcatgctcatagccgctgccctgatactgactgacataagtgacgccggggttgttttcatccagaatggtattggtctttgtaagagcgatgcgcccgccttcttccgaaagcacctgtttggcttcctctatagcatcctctttggtacgtggaccggaaggagcattgccctcatcattcccgcttccttttggggaagctggtttgatattctttggaatggcaccgctttttccggtcggaagaggagcgccgctgctgacttcatcccctagaagatcttccagagcatcggcagcggaatcctcgccatgcatttccaattcctcccgtgttttttcgatgagcggctggatatagttccaggtcagggctaagagcgcattggaaaccagcatccggtcagtgcctttttccgattccattgccgtatccagaagatcggtacaatcggaaatggtatccagataatccccctgatagccggtgggattgttgatgtttccggtccggcaataggaaaggatcaggttggcaatgatggaaaatggctggtattctttgtcaatttgttcctgtatggaaggaatctgttcggacatacgcaggttattgagttcaatcccctgtcggaaggtgccgtggaattcctcacacatacggtcttcaatatggatgtcttccagaatgttttgaaaagttgcggcgcatcgtgccagtgtcaggcatccggctttgtccttttcttctaacacttctttgatctcctccagtgctgtctgataagctggaagggatagctccggctccttcggatagaaggaaccgttttccagactcctcagatgaacagcgtgggctgtgaaatcagaatagagtaagtgccccacttcatgcccggtgagccctgtcaggctctgggaacgtaagaaacgggtggggaaagactgggtgatcgggttcgctgcgttgagatgtaccttataattgtcggtatatgcaacgcctgcctgttcggaaatgtcccagtccagcagtacctgcagtccataccggtaacgtccggtaacggctctggcaagggaggtctggtacttctgataggcagcggagaggaataactcctcatccgcaatggaatcctcttttgcccggattagtttctttaaatttctttggctgtgattcacgtgatattcttcctttcttttcttagattttttgtcagcagttcctccatcgtgcagccgtaatacacagcaaggcgaaggacggcataagccatcggggaggagtttgcattttcataattcataatggttttcgggggaagatttaagattctggcaactgccttttgtgataacttcggtgttttggcttgccggagataagacagattatctgccagatgctttcggatctgggcttctgtgagtgctgcttttctcataggcgtgtcctacgcagcaagcacagtatccagacagctttcttccacttccgtacggttctcagcatcggcagaggcagaggcaagcaccgtgtaacgggccgcttcccggatatccccgcagaccatgtaggactgcacccaggaaatcagctccctcatgccacagcagccatctgtaatgagattttcccggcagtagacagccatggatttgacaatgcgtgtcatcagacgtaccgtttttgcatccttgcatccggtaacagccatggcacgttctacctgtgtatcctcatccggttcatccagatcaatcacaaggttcattcgggaaatgacagactggttcatctgtttacagcctgcatagtcattgtttgtggtgattacgatggtcgtatccggatgacggtggatggtttctccgtttggaagatatacgctgttacagcggtctaaaagggagttaagtccaaccagtacaccgggattagcaatgaccgtaggctcctgtatctcaagaatatacccatagcggatggcttcgactagaggcgtatccacatactggaagttctgtccggaggtgtgttccttataatagctgtgcatttcatcaaaaatcgtatcgatcagcttctggtaggtgtcctcggcagaaatttcttcatcatagtttccggtcagcttctgataggcaccggagggatctaactggatttcctgaaaagacgggtactgccgctgaagccgggtgcgttttccgtccacatccggaagaatctgacctaaaaggtcgaatacctctgtatttgcggaacaggtaatgcagcggtaaggaaggtgaagtgcggaagcaatggctttggctccttcggtctttccggtacctgccggtccccgtaaaagaaaattccgcatcggctgtgtggtatccgttgtcagttttgcgtgttcgcagatccgtttgatttccggagggatgatgtaccactctgccaatgtcggaacagatacctcctcttccggagacagccttcgggatgcggtcaggataaatttcccaacaaaatcatctctggaaatggctgcctgtgctttcttaaatccacttcctggacgtaacacctgaaagtctccatggagcacttcggttggtgcatagacccccttctggatatttaacggtttgatcagcgacaatacgccgtttgccggaaggtcaatcttaacaccaccggtcgggagacctgatgcatagcgggttctccggtaaatgttgtcgcagagaacggctgctgtttccgcagcggcgtccagatcgggataaccgttgtcccggtgcgcttttaattcctgatacttttcattacactcttcatctgccagaaaaaccggcatcagtgcgaacagcagagccgcaccggactgtttggagtctttaaattcgtatttttccggtgtgctttccacatccggcggaggagtatagcagcctccgtaaaactttccgtttagctggttgtagacaaccacctgaagatcaccggttttgctcggatattccgccacaacaaaattgttggattgggtaccgaccgccccaagcttttccggcggggtactgccaaccgggttttccagctccagataagcaaggactgcccgcagggtagctgcatgaagcgtggattttttccgtggctgagtacagtatttggatgcaatgtcatcaaagattgcatggtccgtataatcctcaaatggttccgggagtttgcgtttgaacccccaggttgctacgatgttatttgccatgattcgttcctccttcttatgagatccaggacagttccagtgcctgctcggtctcttctgtggtcaattcatcttcagtaaaaatctccgtcaattcgccccagtaatctttgggcgggaaatgttccagctttccccggacttccggttcagtgccgttcagaatatagacatctccctgctcgttgataaacagcttttcatagccccttgcctgtaagtcaccgaccaattccatcagtagcggtttcccaatcagggaataccatgatttgggattaacggctggtctggaatccggatttccttctgacggttcctttttatgtaaggattcaatggtcatcatctgaagcgtcagactgccacgggcatccatgagaatttccgcaaaattataacttccggtattccgtgtgcgaatccgtaatggttccccatccagtatctgggagagcggtggttctttcacaaaatcccatgtggcatccgggaaggcttccttgagctttccggtaatctggaatttgatctgtctccagagaatggtttccagatcaggtgttccttccagatgacgagttctttctgggcgttttcgtagcttatgctccctgtttttcaggcgttccgtgaaaagcgggagaagataactgaacagcgtgactccgataccgatcagggcaatgcctgcaatcagaagccggttggcatcctgtggtacgaaaagtgctgcaagaaacagtacaagcacgacaaactgtaagaatttttttcgatttgattttttcatgagctgattcctttctgattcatgattcttagacaagcccggaagctggatgggaaatcgccgcttccggacatgaaaaagaggaactgcatcatcacaaagatgataaatgcaattcctcaacatagggttccttgagagttaatagggcaactgggatgccatctgttccggcacattttgaaagccgtcagttggctgactgcccggcatacctccgtaatttggcattccggtataactgccctgcggcgggtagctgctctgtggctgaccggttccgtttggcggggcctgatactgtccgccatttgcaggaggcgtgtaggcaccgttagcaggagccattccctgctgtggatagccgccaggcattgcctgattctggtagctgccattgggatttccctgcattgggtagctgccattgccggctgcaccgggcgttgccgcaccaccattcggctggctgttctggtttgcacccggatgtccggtattgctgtcagaacggttggatggtacaaagtgccagtccttgacattgatcctcggaccggcatttgcctgccccgcattctttcctttctgataaatgaacggatgaagctccagatcaccatagatcatcagcccggttcctttctttacgcctgcttttgctaagcgttctgcaaggaacttgttaaaatagcactgatagtaaatggtttcttcctttccatcctggcctcgctgtgaaactgcaatgtccagagaaacatattccgtaccggaattttttccttgctgcatctcaggatctcttgtggccctccctaaaattgttaaaattgctgacataaaaattctcctttctgcctctttgggcgttaaaatagattaaaataaaaaaagtgccattatagcaccgtataaaacggcagtataatgacacgattttccaaacttaaactgcatatgcttctggatgaatggtccagactcccatgacgggacagcacaaaaacttaaatacaagattatattaacacaagatatagcatatgtcaaaagaattagaactatatatagcatatgtagacgaggtggaaggataatatcaaaagaattttggacatagttataaaagtgcaatataatattgtttaaatcggaaaatggaaggatgagaaaaatggagcagaaaaacagaattctgattgtagaagacgatacggatatcaataatcttttatatacggcattacagaaagcagggtatgagacggtacaggctttttccgggacggaagcgaggatgctgttccagatggataaggcgggcttttctttgattctattggatctgatgcttccgggaatttcaggagaagaggtgcttgcccagattcggaaacagggcaatacgccggttattgtcctgacagccaaagacggattggatgaaaaaatcgggcttcttaccagtggggcagatgattacattacaaaaccgtttgagatacaggaggtgcttgcccggattcaggttcagctccgccatatgcagcaggagccggaacataaaagcgtgtcatataaaaacctggaactggaccgtgagcgctttgaagtccggattgccggagtgctgcttcccaaaattacaaagcaggaatttgcaattctggagcttttactggagcatccgaaacaggtcttcagcaaagaagagatttttgaatatgcgtgggatgaacactatatgggagagacaaagacactggatgtacatatcagcaatatccggaaaaagataaaagcagtaacgcaggaggaatatattgataccgtatggggaatcggctaccgtctgcattcttaatctttactctttttttactatttatttgcgtttgattaggatttatccgatatgataacagcagataagaaaaggagatgaaagcattgagtgaattgttattaagtacaaatggattgacgaagcagtatggtcatcataaggcagtggataaagtaaaccttcacataaaaaagggtgctatctatggatttatcggacggaacggtgcgggaaagacgacttgcctgaagatgatcagtggacttgcaagaccgacagccggagagattgagatgttcgggtgtaaaggaaaagaactggagaggattcgttctcgtgtggggtgtctgattgaagcaccggggctgtatggcaacatgaatgcatatacaaacctgaaaataaaatgtgaattgtttggtattcggaaaaagggatacatcgaagatatcttagagacggtcggactggaaggtgtcggaaagaaaaaaacgaaacatttttcccttggaatgaagcagcgtctcggaatcgggctggcactggtcggggagccggatctcctggtccttgatgaaccgatcaatgggcttgatccccagggaattgcagaggtgcgtgataccatacagagactgcgagatgaacggaatatgacgattttgatatccagtcatattttagaggaattatctaagattgcaacggattatggaattatccataatggaagtcttctgcaggagctgacaagcgaagaactgatgaaacgctgcagtgaacggattgaaatagagttaatccatccggagcaggcagtcccgattctggacagaatgggatttaccaactatcaggttacagataagagccatatccatatatttgaacgattgaatgaaagcgccaatgtcaatatggaactggcaaaagcaggaattttggtcaatggaatttccattaccagtgaagaactggaaacctatttcttgaatctgacaggagggaatcaaaatgcttaatatgataaaaatggatctgtaccggatggtccggacaaaaagtatgtatgtggtatggattgtgatggcggcagctatattcttctccacatccatgtcgaaactggatattgatacgatgaacaaggaagcggaacaacagcagacagaaagcattgcagaaacagtgaaaccagaaaccatcaatatgggaatgtccgtattcctgccgacacagccgggagaaaaagtaacggtctttgatcaggtatatgcaaacctgcaggcgaagtttgtggcgttgtttctggtgatttttacagtgctgttttccagtgcagatataggaagcggttatattaaaaatatcggcgggcaggtaaggagccggagaaacctgatcttttccaaagcttccgtgttgtttgtgtatacgactgttaccatgctgctttatttcatcattcagattattgcacagcagatgtacttcggatatctggagtgggggaatggaagcgagttgctgagatactttggtattcagattttgcttcattatgcactggtactaatcagtatggcgattgcggtggttttgaacagcaacgtgttcagcatgacgattgttatctgcctgtgcatgaataccatgattgtcttatacggagtgatcaatcatttgatccagaaggcaggtgtggagaatttccagattttgaaatatacagtgacaggaaagattgcacttttatccatgtcaccgaccaataaggaatgcctgacggcagttgtgattgcggcggcgttcggaatcgtggttacattactgacagcatgggtattcagaaagagagatatctaaatgataaaactagggttcgtgctattgatagcagtgatactggtacaaggaatgttattttggaaataccagcggcaggtgaaagacatctgccgccagttgtcgtttctgatgaagcacgacagcaacatgctgattaccagagaaatggattttggaggcattggtgagttggcagatgttttaaacgaatggctggaactgaagcgaagggaaaagaaggaatacttgaagaaagaggagatgatttcggatacatatacaaatctctcacatgatatccgtactcctttgacatcccttgacggatattttcagttaatggaaacctgtgaagaccagaaagagcagagacggtatatgaagatcatacaggagagaatcggcagcctgaaagaaatgctggaagaattatttacttttacaaaacttaaaaacgattcttttcatctggaaatgtcatcctgctgtatcaacaagattttgaaagataccatattttcctactacgatgaatggacgggcagaggaattgaaccggagatacagattacagataaactgctgtttatgaacggaaatgaacagggaatccagagaatttttcagaatatcataaaaaacggactggatcacggggagaagaaaatcagtatttcactggaagaagttgaaaacaacatccggatacagataaaaaatcaagtatgtcatgtggaaaaaataaatgtagatcaggtgtttgaacggttttataaagcggatgaagcacgcagtaagacttccagcggtctcggcttatcaattgcgaaagagctggtacttcgtatggatgggaaaatcagcgcccggatagaagggaatgagttctgtgtggagattgtgtttccaaaataaaaggaaaaatttatattaaagcaagtgaaaatggggaatgactttatataggtttcatggtagaattacagtagaaagagaagagtcactcagtcatttgttgtatgaaaggatgagtataatgtataaagtagaacttaaatttgatacaagcaagctcgctccggaaacggtaaatcagatgtgtgaacaggcagatcagatttttgagcaggaggatttaagctgtgcagtcaaagcccttggaagcaggatttatcttgaccggggacgcaagcaggactatggaagattctgggcagcaatctttcagttgaaaaactccgtaggaattgcagagaatttgttagagtgtttctggtataacggaacagaaaaggagaacctgattacagactttataaggaactaacagatggacagcttacagaggaaaggcatcaattttgacctgaatacacaagcactaaaggaatattatccgaaaggtgactggcataatgcatatgcggatgtaagggacttttttgaagcaaacggatttgagcatattcagggatcgggatatcattcggtggaagcaatgtcagaagcaaaagccatggcagttatttatcagatgacaaaagaatttccatggctcaattattgtgtgaatgtgtgtaccatatcagatgtaccggaactgtttgatatctcgcatgtatttgccagagaagcggaacggttggaaaagaaaaatgcatgatttgacaaattatttccaatatgttatattcatctcaagcaaaaaagggagtagctgaacgccttgaaagaggtggttttgtaaccgacaaccggtatcgagagatacccgtagcaaatgagatagcaagacttttattgtggcagaggtcatgataggagtctttttttattatgaaatatagaaaatctgccgcaatagtctgctaaaaagaaagagaggataaacgatgagtaacgaaatgatgaaacgggaaatgcaggaagcagtacaggcaggggagcgggcgcttcagagcctttacgcagcaagggataagttgggaagtgcgagaaactggggcatttttgatatgcttggaggaggctttatcagtgactttgtgaagcattctaaaatgaatgacgcagctgcgttgatggaacaggcgaaaagcgatattcagcgttttcagagagaattaagagatgtgcaggtttccttggatctgcgcatggaaatcggcagcttcctttcctttgcggatttctttctggacgggctggtggcagattatatggtgcagagcaagattgcagatgcaagagaacaggtggatgatgccatcaaccggatagaaaagatacttgctgatgtgaaaaatcggatgaatggggaggtgtagcatatgggatgcctgggaaatgtgttgtggtttgtgtttggcggcgcagtcagtgggctgagctggtgtctggcaggttgtctctggtgtattaccgttgtggggattccggtggggatgcagtgttttaaatttgcggcgcttagttttttcccctttggaaaagaggtgcagtatggtggcggagctggttcgttccttttgaatatcatctggctgattgtatccggtctgcctcttgcactggagcatctggcgttgggtacagctttatgtgtgacgattatcggaatcccgtttggtttacagcagtttaaactggcgaaactggcattgatgccgtttggtgcggaggtgtattaagatgcgattatttgataaaaggacaccgcttcagaaggagtgggaaaggctggaagtacaggagcagagattccttcagaagcgttcagagaaaagggagagcattctgaatcagaaactggaggaaaagataccgccgaaacttcagaaaacattggataccgcttttgcgaaggcatttgctctgattttcgagaaaggaaccggggttattgaaaagacgtatcagcggacaaaactggagcaggattatcaggtgcggcagtatatggcggatgtaaagcagaattccaaatccctccgctctttttctaaaaaggcaagagatacgggaacaaagaatttactgctatccggtgtgtctggaatcgggatgggcgtattgggaatcggtctgccggatattccggtatttacagggatgattttaaagaatatttatgagactgctctgcagtatggatacagctatgaaagcagggaagaaaaatattttatcttattattgatccggggagcagtatcctatggggatacactttgtgagattgacgggaaagtaaatgaatttatcagaaacggaatactgccggaagagtatcaggataaggagcagatcgaacaaacggcgggcgctttgtcaaaagagcttctgtatatgaagttcttacagggaattccggtggttggtgttgtaggcggagcttatgatgcagtctacatgaaacggatcacagagtatgcagagctgaaataccggcacaggtatctggcggggcggaaaaaggcagagaatggacaattatgtaaaaggtgtaaaagttatagagatatatgatgccgcaaataaggaattgctggtaaagtatgatgataagcataatatagacaaggttatttctgctttaaatataaaatcatggaaagagacagaaaaaagcataggtatgaaccctaaatataccataaaattttattgcgatactacgaaccaagatgaagaaaaagatataaaagaaattaccctttatgaaaatggggaatatgctacgatttttattacttctcctggcggagtaaaacaaaactataaaacgagcattgatatttctgaattggttatctaataatatttgtgtaatgagaatgaaaatctaattctttcaagtttaactaagacattcccggagcaaatgctcatgtacggtaaggaagcaagcaaccgaaaacaagagatagaccgccagcactacactattccgaaccaaagaccaaaagataagcattgtgggaaaatctaaacttttggattttcctacaatgccaactacggcggaatccctcccactccttatatctttctgtatacattgaatttgtatttagtaaaatgcagacaacaccacggatcggcttttggttggacaattccaaccaaacaccacagcagacagcagaaaacattctgaacgctaggaagccggtatgattgttacatataaggggaagaaaaatttcttttaggtacttgctttcctaaaactgatgtgatacaatgatttaatccagaaaaggagtaaaaaatatgcggcaaggtattcttaaataaaactataatcaaatagtgggaacaaaggattatgatagctccttttgtaggggcttagttttttgtacccaatttaagaatacttttgccttatcaattttgacatatccccaaaaacagcaatcacaaacaggtgtatgctgtatatgtgtatgtccgcaacttataatccccagtggtaaaagtattttactgctggggatttttatgccctttggggctgtaaagggaggacaatcacatgaaaataatcaatattggaattcttgcccatgtagacgctggaaagacgaccttgacggagagcctgctatatgccagcggagccatttcagaaccggggagcgtcgaaaaagggacaacgaggacggacaccatgtttttggagcggcagcgtgggattaccattcaagcggcagtcacttccttccagtggcacagatgtaaagttaacattgtggatacgcccggccacatggattttttggcggaggtgtaccgctctttggctgttttagatggggccatcttggtgatctccgctaaagatggcgtgcaggcccagacccgtattctgttccatgccctgcggaaaatgaacattcccaccgttatctttatcaacaagatcgaccaggctggcgttgatttgcagagcgtggttcagtctgttcgggataagctctccgccgatattatcatcaagcagacggtgtcgctgtccccggaaatagtcctggaggaaaataccgacatagaagcatgggatgcggtcatcgaaaataacgatgaattattggaaaagtatatcgcaggagaaccaatcagccgggaaaaacttgcgcgggaggaacagcagcgggttcaagacgcctccctgttcccagtctatcatggcagcgccaaaaatggccttggcattcaaccgttgatggatgcggtgacagggctgttccaaccgattggggaacaggggggcgccgccctatgcggcagcgttttcaaggttgagtacaccgattgcggccagcggcgtgtctatctacggttatacagcggaacgctgcgcctgcgggatacggtggccctggccgggagagaaaagctgaaaatcacagagatgcgtattccatccaaaggggaaattgttcggacagacaccgcttatcagggtgaaattgttatccttcccagcgacagcgtgaggttaaacgatgtattaggggaccaaacccggctccctcgtaaaaggtggcgcgaggaccccctccccatgctgcggacgacgattgcgccgaaaacggcagcgcaaagagaacggctgctggacgctcttacgcaacttgcggatactgacccgcttttgcgttgcgaagtggattccatcacccatgagatcattctttcttttttgggccgggtgcagttggaggttgtttccgctttgctgtcggaaaaatacaagcttgaaacagtggtaaaggaaccctccgtcatttatatggagcggccgctcaaagcagccagccacaccatccatatcgaggtgccgcccaacccgttttgggcatccataggactgtctgttacaccactctcgcttggctccggtgtacaatacgagagccgggtttcgctgggatacttgaaccagagttttcaaaacgctgtcagggatggtatccgttacgggctggagcagggcttgttcggctggaacgtaacggactgtaagatttgctttgaatacgggctttattacagtccggtcagcacgccggcggacttccgctcattggccccgattgtattggaacaggcattgaaggaatcggggacgcagctgctggaaccttatctctccttcatcctctatgcgccccaggaatacctttccagggcttatcatgatgcaccgaaatactgtgccaccatcgaaacggcccaggtaaaaaaggatgaagttgtctttactggcgagattcccgcccgctgtatacaggcataccgtactgatctggccttttacaccaacgggcggagcgtatgccttacagagctgaaaggatatcaggccgctgtcggtcagccggtcatccagccccgccgtccaaacagccgcctggacaaggtgcgccatatgtttcagaaggtaatgtaaagatacataatcgtcaagacggcaacaatcagaagttatggagggtaacaatggaatatagtaaggaagatttaatggaagcaaaaaagcaaatttggggagtgggagagaacatgggaacagaggaaagtaaaaaaatctgggaggagaacgcacaattttgggataatgcaatgggtgacgaatctaatgaatttcacagagaggtagtgcgtcccaaagtaacggaacttctatctcctaatcctgcggattacattttggatattgcgtgtggcaatggaaattattcttcgtatcttgcacaaagaggcgcttcggttgtcgcttttgattacagcaaaaaaatgatagaattggctaaaagacggcaatcacaatatgcaaaacaaattgaattttgtgtggcggatgcgaccgatagaaaaagtatattagaattaaaaagaaatcgagcctttacgaaagcagtttctaatatggcaattatggatattacggatattgaaccacttcttatggctgtttatgaactgttgcaggaaagcggaatttttgtctttgcaacgcaacacccttgttttgtcacgttgactgaaaaatatatgacaccgcacagttactatgatatagcgattgaagggcaaccgaaagagcagatttattatcatcgttccatacaagatatttttaacctttgttttagagctggatttgtcattgatggattttatgaagaatgttttaaaaccaacaaagaaattcctatggtaatgatagtaaggcttaagaaggtaaaacgtgatagcttaaaataaattcaagtttgtcgggtaaatagcaaacccagccgagccagtcaacggtcaagatgaacggcgcatatgcgcagccgttgacagccccgcccgcctttgctggtaggcaatcaaggggcgacagcaagaagtgccaccgccccgcactattattcagaaaggggaatttccatgaccgaccagatagcctatcaagaatatatccagcgcaggtacaacgccttttgcaagactgttatccgctgtgccgccttggacaagattttgaagcttaaacggcaatgggaacggcaagtttcccttgactatctgatgaacgagaagtttgtccagtttgccgcgtcggagccggacgaggaatacccatttaccgtctgcggtcagaccgtcctgctctgcaacgccgcccttgccgacgcgatctctgttttgccggagcagacgcgggaagaaatcctgcgctattactttctgcgccagccgcagcgcgtgatcggcgcgtgtattggccggtcacgcagcacagcggggcggcatatccagcttgccttgcagcggctacgcgaagaaatgggggtgagccggtatgagtagacttctcccctatgaaacaatcctcaaagcccgtgagggcgacccagaagccgtgaacgctgtcctgctccactacgccggatatatccgctatttctcaaaagtgaacgggcaggtcaacgccgaggtggaggactatgtaaagcagcggttaattgactgtcaattcaagttccggcttgacgaaccaccggacaagtcataaaaactgaataccagccgccaccgacgcggccagcgaaagcagtaagtcttgaaaaagatttactgctttttttgttgtccggctccgctcccggccattttgccccctgccggttgtagtagtaagcgaggagggaatttttctgccctggtgtttggcatttggagcatttacccgtagtagagggcaaagagaaaggatttctccaacaccgggtagaaaccactgcgtccggtgtcattttagcgaaagcgggcaggaatgccctttacaggattagtagtagcagaaaaagagaaacaaacttttgtggttgcagttttccaaaaaagtggcggacggaagtgagagaaagtttgcagtcacggagagcaagtttctaccacggtgccaaaatccgcaattctgcagttttgcccctcgcggggaaacttgttggggagtgccttccccaaaccctgctcatgcgcccttacgggcgagaaaggaggtcacaccatgcgaaagaaatacaacacgccccaccgcagccgcgttgtgaaaacccggctgtccgaagatgagtatgccgacttcacagcgcggcttgcgccctatggtatcagccagtccgaatttctccggcaggcgatacggcgggcgaccatacgcccggttgtccatgtgtcgtcggtcaatgacgagttgctttccgctgtcgggaagctgacagccgagtacggcaggatcggcggcaacctcaatcagattgcccggtatctgaacgaatacggcgtaccctacaacaccctttccggcgaggtacgcgccgccatatccgaccttgccgtcctcaagtatgaagtcctcaagaaagtaggtgacgcggttggcaacactcaagcatatcaactctaaaaacgccgactacggagccgccgagcaatatcttctctttgagcatgacgagtttaccatgaagcccgtccttgatgaaaccggcaggcttatcccccgcgaggactaccggctgtccacgctgaactgcgacggggaggattttgccgttgcgtgtatgcgggccaatctccgctatcagaaaaaccagcggcgggaagatgtgaaaagccaccactacatcatcagctttgacccgcgggacgggccggacaacggcctgaccgtagaccgggcgcaggcgttgggggaacaattctgtaaagagcattttcccggccaccaggcccttgtctgcacccacccggacgggcataaccacagcggcaacattcatgtgcatatcgtcataaacagcctgcggattgaggaagtgccgttcctgccctacatggacaggccggccgatacgaaagtcggctgcaagcaccgatgtaccgacgctgccctgcgctacttcaaatccgaagtcatggagatgtgccaccgggaggggctttatcaaatcgacctcttgaacggcagcaagaaccgcgtcaccgaccgggagtattgggcgcagaaaaagggacaggccgcgctggacaagcagaacgcccccatgattgccgatagtatcacgccccggcagaccaagtttgaaacgaacaaggagaagctgcggcagaccctacggaaagcccttgccaccgccgccagctttgacgagttttcctctctgttgctgcaggagggtgtgaccgtcaaggagagccgggggcggctttcctacctcacgccggacaggacaaagccaattaccgcccggaagctgggcgacgattttgaccgcgccgctgtctttgccgttttagagcaaaacgccgccagagcagccgaagcgccagccagatcccccgatcccccacgcaccataaaagaccgcttgcaggttgccagagccgagatagccgccccgaaacaggacggagtgcagcggcttgtggacattgagcagaaaatggccgagggcaaaggccggggctatgaacgctgggcgaagatacacaatctgaagcaggccgccaaaacgctgtccgtctaccagcaatacggctttacttccccggagcagttagaagccgccgttgacaccgcctatcagaaaatgcgccagaccagcggcgaactgaaagcactggaaacgaagctgcaagggaaaaagaagttgcagcggcaggtgttggcctacgcccagaccaaggccgcccgcgacgggctgcgggcacagaaatccgagaaagcccgcgccgcataccggcaggcccatgagagcgattttatcatagccgacgcagcagcccggtatttcaaggcgcatggcattaccaagctgcccgcccggaaagcgttgcaggccgagatcgagcagcttatctccgagaaagacggcctgtataacacctatcacgaacagaaacagcggttcaaggagttgcagaccgtcaagcggaacatcgaccagattttgcgccgggacgagccgcaccgcagaaaggagcagagccatgagcgataacctgccccacatggactaccgccagcaccggcgggcgcggcggctggtacatgagtgctgtaactacgatgaggggaactgcctgctattggacgacggggagccttgcgtgtgcgtccagagcatttccttttccctcatgtgccactggttccgtgtggctgtcctgccccttgacggggagctggccgcagccctcttgtgccggggaagccggaaacggtgtgccgtctgcggggcggcctttgtccccaaatccaaccggggaaaatactgccccgactgcgccgggcgcatgaagaaaatcaaagccgccgagagaaagcggaaacaaaggcagagatgtcacgctttagagcctttcaaacccgcataaatcaaggcttttttcgtgggtgtcaaagggtacgcgatacatttatccttttcccccggaaacggcgttttaatgcgtgacaatacgccaaaatcaacccgaacacagggaggtgatcctatcgctgattatatcagggcagacacgcggctgcccgcctatctgccgtatccccgtttcctgctgaaaatggagatttcacagaccgccaagctgctgtattcgctgctgttagaccgttccaccctctcccagaaaaacaagtggctggacgacgagggcaggatttatattatctatcccatcgcggagatagcagaaatactggataaaggcagcaccaccatcaagggggcgcttaatgaactggacacggcggggctgttggaacgggaacggggcggcttctccgcaccgaaccggctttatgtcaaagtaccgccagtgccacaggtacagttttcagaccaactgatggccggaagtccgcccctcatagagccggaaaaccgtcctactgatggtcagaaaaccgaccttatgatggtcggaaaaccgtcccctaaccaaactactataaacaaccttacagagagccaaacaaagggagtgagtggggggccgtccgcgccctatggccgatatggaaatatttttctgtcacagaccgaatacgacgagttgcaggcagagtaccctgacaggctggaacggttcatcgaggaaatgagccgctaccttgccgccaacgggaaaagctaccagaactatgccgccgccctgcggatatgggcggggaacgacaaaaaggaagcccctaaaaagggcataccagactactcatgcaaggagggcgagagtttatgaagaatgaaatcaacgcggttttggagaatatgacgaccaccatcccggagccggaggactacaccggcgaggacggtttactgtactgcggcaagtgccgcaagccgaaagaagcctattttgcgccggataaggccgctatcttcgggcgcgaccgccacccggcagagtgcgactgccagagaaccgcccgcgaggaacgggaagccgccgaaaagcggcgcagacaccttgacaccgtggaagaactgaaacgccggggctttaccgaccccaccatgcgggactggactttcgagaacgacaacggcaggaacccgcagaccgggcttgcccgccggtatgtggagcattgggaagatatgcggacagacaatatcggctgcctgttctggggcggcgtaggcaccggcaaaagctaccttgcaggctgtatcgcaaacgccctcatggagaaagaaatccccgtccgcatgacgaactttgctcttatcctcaatgaccttgccgccagctttgaggggcgcaacgagtacatttcccgcctttgtcgttatccgctgctgatccttgacgacttcggcatggaacgcgggacggaatacgggctggaacaggtgttcaatgtgattgacagccgttaccgcagcggcaagccgctgatcgtcacgaccaaccttacgctggacgacctgcacaacccggaggacaccgcccattcccggatttatgaccgcctgctttccatgtgcgtcccggtacgctttaccggcgacaacttccggcaggaaaccgccaagcggaaaatggagagcatgaagaaactgattaccgactgaaaggagtattgcctatggcagataacaagcagcacgacacccgcaccacccgccgccctgactgtgtgacggaaatccgcatgggcaattccgtccttgtcgtgtccggctatttcaagaaagacaccacaaccacagccgccgacaaaatggcgcgggtactggaagcggaagccgctgctacacaggagccgacttatccggcgtgaaccggggcatggaaaagcggccatgccagggagcatgaccgctggaacgaaaatcggaagtgctttagcaattcttaatctcattctctataaaataatttgcaatttcaaaggcttttattcttctctttgccaatgtgatttgtgatttataacgctcggaattatcctttgattcaaatgtttttactgtttctcttagcttgtgcagagttgaatcaatttgccttttggccgcggttaattcatctattgtatacttcatgttttctcctttaacttctgatttttttgttaaatcagagtataccacggagttatgaacttttctactgcaaatatgggacgacaacccataccataaaaatcggaaaattgaaaagctgtaaagaagcaaatttaacgcttttgccgctgtacagcccccgccgttccgtggtacaatgaaaccacggaatagtggggctggctgtcggaaacggaggattttatgttaagacaagccacccaaaacctcattaccgccctttatccgagattgtcccacgaggatgaattgcaaggcgagagtaattccatatcgaaccaaaaaaggatactcgaaacctacgcaaaacagaacggctttaccaatctgcgctggtacaccgacgacggtttttccggcgcgaactttgctggggttagatagcgatactttttacatctaccatgttgcggcggtcatggttgacaacttgcgtcggctcctgctcggtatcaacctgtccgacaaagctataatggatttcgattttccgggtgttggtttcccggtctaattcatgtatcaaaatacggtcgataaactcatggacgttttcataggtcaattcctgtatgtcgctgtatttcccgacaatctgaataaaccttgatatatccctttttcgctcggtaacggttgcgatctgctgttgtaactcgtctatccttgcggcaagggatttcttttcgtcctcatagccggaagttagaaacacaaaccgttcatctgtcagtctgcctaatgcgttgtcctcatacagcttgcggaaaagcgtgtcaagttcggtcatacgcgcctgtgctttgaaaagttccttttgctgctgcgctaatgcctttctcgcttccatgtcgccgtactcggtagctttacagataaagtcctgttcgtgttccttaacataccgcaaaacccgccgcatatcttccagcactaaatcaagaagtacgtttttgcggatataatgagaggtacactcgctgcctgtccttgccctgttgcgccatgcgccgcaagaataggaaaacttgcgcggctcgatatttacgccctgttggtaatacatcttatgtctgcaaccagcgcaaaacagcaagccggaaaaaatatcaatctccgctgcttttgtcgggcggtggcgggtagcaatccgcttttgcgcaagttcaaaggtttcctcgtcaacaagcggctcatgggtgtttgggaagaaatagcgttgttcttcttcgttcttccgggtctttttcgacttgtaggataccttgtgagttttcgcggttatggtatgccctaaatattcctgccttgctaatatgtcatagagcgttttgtccggccaagtatagggggcgatcattgcccgctgataccgcgcctgtcctgtacgctgatagcgcaacgctccaatcgtcaagactttgttttccgcaagccatttttggatttcgcacatacgcacgccgctaacaaacatagcgaaaacctgtttgacaatcggcgcggtttccgggtcgggtataaggtggtggcggttgttcgggtctgggatatagccgtatggatattccccgttgacgcgctcgcctttttgcgcctgtgcctgtttaactgcgcggattttcttgcttgtgtcgcgggcgtaaaactcgttaaaccagttccgcaagggggtaaactcgttatcctcccgcgctgtgtcaactccgtcgttgatcgcgatatagcgtactccgttttcgggaaatacaatctctatgagttcgcccgttttcagatagtttctgccaagacgggaaaggtctttggtaatgaccgtcgccactcgtccggcttccacttcctgcaacatcgcttgcagcccctcgcgctcaaaactcacgccggaaaatccgtcgtccacaaaaaactttgtgttcaaaaaatggtgttcgtccgcatagcgttgaagtatcattttttggtgctgtatgcttccgctttctccggcttgcatatcctcttgacttaaacggcagtaaagggcggtgattttattcgactgtaacattagtcctcctttccgacagccgaataaacaggtataatgtgttgctatcattataccatatcccgccgcctaatgcactactcggacgctaaaaatcccggatttccgggctttttctgcaaatcctttacaatgagtttctcaatctttttatggattgtatcggttgccttttcactcggcaacgcttgaacaagataggtgattttccctattttgcgttcggttgtaattgtctgttttttatccattagaaaaacctccttttcctgtatggataaactatattcgtcaaaaggcaaaaacgggcggttgttagctgcaacctcacgggagtttcaccccggcccatgcttatgggtgcgccgcgcaatactttgagggtgttcaacgcgggagtatcattgtgccgccttgtatgtcgtcgcccacaagctgctaaacctgttttacggcgcggtagttctcgctcggcttttcccctatggggaaaagctgtcatggcgtacccgccgactggctcggtacagacggaatgtacccgtttgcctgttatgctgcgcaccaaaggccgctttctttgtcaaagaacaataggctttgtcggcctgcaaaagcacatcaacagcggatatgcttttgcggaacgacaaatagcccataacgggaagcgtggaaaggggacacgctccccgcatgggctaaaagattatcctacatgaaaagcaagggtgcgggtaataaggcgcacttgcagcctgttacgcatttcctcgtccacataggaataggtattgcccgcgtcgtctttcagcgtgcgggtacaaagtttcgctatgtaaccctcgtagtgcttcaagatcgcgcacatggcggttgtgtcgccgtttgccgctgcggaaatgacagggaacggcaacagattttcagacttcctaacggtattcatcatctgcttttccctccaaatactgtttgattttcgcaagcgcggatttcctgtgccggaaaaccgtcgtgcgtacaacattcagcagttcgccaatttccgcgtcgctcatatccaagaagtaggacaaaaggataatgtcgcgtttcctttcgggcaaagcgttaagggcttcggcaagcagttcatttttgacgagtacatcaaagccggacacttgaaaacggaaataatcgctttcgtattcgtccgttgtgaaaagctgcgcgagttcgctttcgctcaaatccgaaaaagtaacttcgcgtgctgcgcgtttcgcaagagtgcggcggtggcttttcgcttcgccgaccaaagttttctttgctaatgcgtcgtactgatgttgtattctttccttgtcggaagaagatagctccatagagttcacctccttcccgcgtggagtagaggacgggagttaagggcttgtcctctctgcccctttcgctccgtacccgttcgggagatggctcttgagtgcgcttttcagaaaaaagttgaaaaaagcaaaatgcgcccgtccgcaagacgcggacgggcgcaaaggaaatgtaagcagtagctaaatgtattgacagttcacattcatagccggaatatcccgcttgcggagcatagctttttttgaccgcaaagcattaggcgggttacagtaaataaaaatggacacggcgatacctccccgataccgccgtatccttaaaaaagggcgactttaatacactacccgcaatccattctataatagggaacagcggcttttgcgcaatattaaataaaaaagccgataacacataggttttttgacctaatgcgttatcggctctgcgtctatgcgtctggcacttttaatcattttttttgaatttattatatgtgttagctaactgtccacaagccgcgttaatctctctgccatgagaaactctcatagtaacttcaagtcctgcttgctctaattgatgtttgaatgcaactatttcccgtttctgtggtgctttaattcttgaattgcttgttgggttgtattgtaacacgttaatcataacttttttgccccgaaaccattttgcaagttgtcttacatctgagggccggtcatttatacccggtaaaagcaaatacgcaaagacaattttgcgattatgcctttcagaataggataaggcttgcttaacaacatcttcaatagcatatatgcgcatgtgaggaataatacgatttcttgcagattgtgttgctgcgtgtaaagatattgtcaactgaattttaagatgttcctcgcgcaatttttttaattgatcgaccggaccaactgttgatatggtaatgccgtcggttggaaagttgagcccatatctatctcggagaatatggattgcttttatcaagttgtcataattgaataaaggctctcccatacccataaaaacgatacggtttacttttcgacgcaacaatataatctgttgtacgatttctgacgatgttagattacgaacaaagccatttcgcccggactcacaaaaaatacaaccaacaggacaaccgacttgtgtgctcacgcaaacagttccaccatctcgccgcttgataaaaaccgtttcaatgtatttgttgtctttcagttcgtaaacatacttttcagtatcactgcttttgcaaatattttttaccaacattgatagattttttttgcgtggtaattgcttatataattcttcatataaggcttttgcttcattctcgccaataacttccgacatttctttgtaagtaaatccgtatggatcattccgtacttccgcaggcgtatatttaggtaaacgtttcatttttatatcctttcttctaaataataaaagtttgtttttctgtatttttgattacaatctctaatttttctacatcaatgatatgcgtcaatttgcatttagggcagaaaagaggaaaatcttttaatacagtattatgaaatacttgaactctcgtctttccgttacaaatcggacattttatccaatattttttaagcattatatttcactcgtcctttttacacaaaaaaatgcaggtcaatcctcaacatgagcattgacctgcatttataatgcacagagcagtacaacaaaactaaggcatagcttgcactatgtctatactatatctatacgtcgttagttttttgtatagcatccgcaaaataagcatgacaaaaaagcccatgttgaaaatgggaaaatcctttttttcaatgcttatctaatacgcatgctatgcaacataaacgccgcctccttttacataaattttattttatcagaaaatcagtctactgtcaatacacaacaggaagtatttaacctaatgatatgaattgtgtggacatatccaaaaagaaaggtgaactgtaaaatgtaacagggtgaatgaaaatggcaaaaagacccgtaccattgtacgactttaaggctttcggggcagctataaaagccgcgagaaatgaatacggcgagagccgcaaaaaggtaagcgacgagttatatatttccccgcgctaccttgcgaatatcgagaacaagggacaacagccgagtttacaggtattctatgaccttgtaacccggtatcatatttcggtagatcaatttttcttcccgaacagcaatgcggagaaatccaccgggcggcggcagcttgacgcgctgctggacggtatgagcgataaaggcatacggattgtaaccgcaacagcaagggagataacggaagtcgaaaaagcagaggattaacctcacaatatgagaaatcgggagattgcagcgcatggcggctgcaatctttttttgcgtccaaaatcaaaggaacgcgcaacaaataccgcctttcggtgggggtatggagtagatagcaagcacagcaaacgagtacccgtttgcggaaaatgcttgttgggataatcccaaacccttataccgaaaggcggtgcggaaatggaaaaccgaaagagaaatatacagatgaagttttacgttacggaagaagaaaagcggctgatcgacgagaagatgaagcagcttcccataaagcagtatggggcatacttccgtaaaatggcgatagacgggtatattcttgtcgttgaccgaagcgacacaaaagcatatatccgggaactgcaagcggtgagccggaacatcaaccaaattgcaaaacgcgccaatgcgacggggacggtttacaggcaggatatagaggacattaaaaaggcggtggacgagatatggcggttacaaagacgcaccctattaaatcaaccttaaaggctgcgatagactatatcttaaatcccgaaaagacagacgggaagctgcttgcgtcctctttcggctgcgggctggaaaccgccgatattgagtttgcatggacgcgggaagctgccggagatcgcggcacacatttagggcggcacttgatacaatcctttgcggtgggagaaaccacaccggaagaagcgcacaaaatcggcatttctgaaatcagccgcattatcaagcggctgtatgaggacaatgtaaacggcaaaatcagcgatgagcgtttcatggaactgtcggctgactacgaagccgagcaagcggagctgaaaaagagagccgccgccctgcaagccgaactggacaagtcacaggcagctaccgtcaacgccgagaaatttatgggcattgtccgcaagcaccttgcctttgaagaactgacccccactctcttgcgggaaatgatcgagaaaattgtggtgcatgagtgcagctatgatgagaacggcacccgcaggcaggacattgagatttattacagctttgtcggcaagattgacttgcccgaataaccgcccgacctatccgacacaatggccaagtgtcggataggaacggcaaaattttttacacttctattgcttctttatcacacacaagtaaatgctcatggcattgaagcggatacaaacactattgtttgatagaaataagagaggttatttataataaaatgagccgccagaactgtaggggtgatgcagtacgggcggctcattttctatctaaacggatgtatccggaagttccggcagttgatcggtgagttcttcatatccgagaatatctccggcacatggcatcgattgccctgttccctgctgtggtttccggaagtacagccgataccgatgtccctctaggagtttgatattcttttccagtgagaaggcgtattcctttccgttatcactggcaaaccaatattgctggtttttcccgaagagtgtctgttcccgtttcgtgcagcttacgtccagtgacagataagcatgtgtatggatcaggtggtagaaactgagtgcacgcaagatgctgcagattccgatgaggaggctcatgaggataaagagccggtcatgggtggcgatcccgaagatgcacccaaaaagtacacagaaaaagccgattgcactgatggcaaccagctttgtgaaaaatggttttggcataaggttccttcctttaacatgtatgaaatgtgatttgtttattcaggtacaaattagcaatagcctgcagcactggatactgggtatggtgaatctggacatcatccacaagtgtttggtaagttgtctccggttctgtgtataactcatccataatatccgattcgttgtggattactttttcctgctccatacttgtgacaagctcagcggtcgtgagggataccttatcagccagcttcagaatggtatcttccatcggtgaagagggtttcttctttaaatatctgccaaactcttttgcaccaatagttccttccagataaagctgaacgcagccaaagagccggatgggaaaggtatccttcaagggaataatggtcagactgccgagaaggcgatataaggcatccacccctgtcagtccaattccgcttacaaccagaccgcgtaaggaaagtcggttcagatagtgttggaaggataagcctttcggaccttctttctgtatctggcgcagggtataggcatcctggagttcatggagcgtcagaatctggaaggcaagacagctccagagcagcagctcgtcatccgatagtccatattcttgtccatcgttgattacaagaggaatggattttccgcctgtcgttttttgaaattttaaggttccgacagcagtataaagtgtcagcataaaagttccctccttcaaggttaagtcagaagtgcatagagtgcatcatcctgctgtaatagtttccgtgctttgctctgccatgcccgtacacgattggctggtacttggtagtgttttgccaagtcaaagctggtatatccctgctgttgcagatagagggctacaattcccttctgaatagttgaggactgtccggtgccaagctgggttaaatgctcaagaagcaaggtctggtttgtgtccttttccgggtgagttgtttgtgtatcctcgtaggaaaacaaatcacgataatggagatgttcatcttcagatgatgcttcgtccagagaacagagcatggagcggtcacgggcaattttccgccagtagtcaaagatggcatgacggatgatagttttggcataaggctggaatgatcttccttcctcaaatccgacagccgaccggcacaaagccagatatccaatctgacataattcctgttgttcttcctcagttacataggcagcggtgcgggtcatggaacgaatcatgatcggaaccagatccatggatttttccaccagttgtttttgctttttatttagtggtaaggtcatcatcaatcaccgcctttcagctggctgcccggaggcggaagggaatatggttgttctttaaaacatctgcggattcccgaatgagctggtcgcacatatagttgctgaactgtccgatgtgagcctgcttatctgtcagacagaacttatctgccacccagcgatatgcttccggtttggaaaggatgccctgttgccagatctgatcgaaaattcgatgtgcctgaatccgcttttgacgaagctcccggttggcgagcgttccttttggtatcttggttcccggatgtaccccgacataggaattgcaggatggatagtgggagcagacataaacctgtccgccatgagaatgcgttccatatacaaaggatgcatctcttaatattgctgttccgccgcagtaagggcagcggatgatttttggtttcttcatctgttttcacctcgcttgtacatacacgatacgtaacgtgtacgtgaataaccagtacgtactgtatacttatattgtaagtaagcaggtgatgaattcccataggacgcaagcggatactgatcccagattcggactaaatggcacgaatccccatttttcagatgccgggatagaaaattgctcggatgagcgggaataagccgctgtctgtgaaacgtggataattaaccggtgtaaagatgaacttctcacagaaaatccgtagcaggaataagctgatcagtaccagacagagcaggtaagtgttcctgcgccttctggtccatggctttttcggacggaatttcacatacaggacaaaaatcatgggaataaatatcaggttcgtaaagacctgatcgatacattggatgattgaaattacgtttaacataggcagtgcctcctttctttacatatcctgtacgtataagagcctgaaagtgcaactttttgttaccagtcatattgctggttctcctgaagccggagcagtgccggaatgggacatggctttaaaggcagcttctgagcggccagatagggcagataaagctctgtaaaagcagcaatgctcatgcttccggtacattcggttggctccggtatccggggaaacaaaagcgctgcatctgaaagagggaggatgcaggggcttcccgtttcatccggatggaataaaaagccagagttctcacagctttcctgtgcgttacaagtgcggcaccagacgtagatacaggagtgccagttcccttcacagaggttcagaaaatgacggatgtgcttggcatctgtcttgcagtgggggtgtttcatattcatcacctactaaagaagcaggcagttccatgtgggagctgcctgcaggagtcttcgttatgagttactgatgtttctttttgcgtttgaagtaaacgatgcccaggacacttgcacctgcaagtgcagctatggcgattccggcatacaggagaagcggcgtctcatcgccggtctttacaggcggagctaccggaggcgtctccggttctttcggaagctccgtcatgtgtacggtctgaccttcatccttcagatcctcatgggaagcaatctcatgctcggtttttccgtctgtatagtagagcttttcaaagacaaccacatcctgtccggcaagagcagaagcgtcgaaggtaaaggtaacttccacagagccgccagctttttctgctttaaattctgcctgagcggtaactggttttccgtcttttaacaaagcctctccggtttccttattcatcagggttccgatgactttgtactcagatccaggcatcagaccatgataagtgaccgtatctacgatagtcgcttccttggaagcagagacatcctgatccccgtcactgccgtctttggctgtggttttgatttccgggaagtagatggtctggttggcatctttgatgtccgcatgtaccgctacttcgtgatcttcaaaagtcattgtttcaaatgccacgagcgtttttccggaaagtgcagaggcatcaaaggtaaaggaaagctctacgctgccgttagcttcttccggagtgaaacttgtttctgcagtcacagctttgccatccacatcgaaaggtttttcggtttccgcatccatgagtgttcctgtcagcttgtactctttgcctgggatcaggtttttgtattccacaaggtctgtaagcgtcagttctttttccggttttgcatagtgtgtgccggaagcagcatctgttgcagtggttttgatttccgggaagtaaatagtctgtccttcatccgcaatgtctgtgtgtacggcaacttccttgtctttgtaagccagggattcaaagacaactactgttttcccttttaaggagctggcatcaaaggtaaaggtaacatctaccgtaccagcggattcttttggcttgaaggatgcttttgctgtcaccggttttccgtctgcttcgactggtttctttgtttctttatctatcagagttccagtcacttcatatttctggttaggaaccagccccttaaaggaaaccgtatccaccagcgtgatttcttcctttgcacaggaaatattggagttcgtgtccgcatctttcgcagtagtcttgatttccgggaaatagatggtctggtcttcatcgttgatgtcggtatggactgcaagctgcatctcatcctgatataattcctcgaagacaacggttgtttttccctttaaggaagttgcatcaaaggtaaaggttactttgacggagccggaggatttctttgcagtaaattcagtttcagaaatcaccggtttttcatccacaaggattggttccccggtttttttatccattaaggttccagtcagtttgtatttctggccctttttcagtccttcgtattccacaacgtcttcaatggtcacttcttttgccggctggctcatgtgtgtaccggtctcggcatccagagcagtcgtgccgatctcaatggcatcatcggtcagagttccaacctgtatcagaacagaatccttataaaccttgacttcaaaggttaaaagatccatgcctttgttggaatcacaacgctgttccgccagagtgtaagtatcgtaaatgagagcgcctttggaatcatccggtttggaggtgccgaaccagatgccgtcttccgaagactcaccccggttggtatttgcggtatgtttgttccatttggaggaagtgctggcataaccgttggcatctgtcacaatcacatggctttcgcctgttgttttggaagtgatcttaaatggcacatttgccagacggttctggctgccgtcagcaatcttgacaaattccagatccccgcggatgacctgattggagatggaattgtcttttgcagtcagttccacgatttttccctgttctgtgatgtcaaattctacagagatctttccgctgttcagataaccggaaggtgcagttgtttcatccacacggtaatgtccgaatgggagagcatcttttgcagttgcagcagaaccggatttatcggcagtaagtgtaaggacaacctgatctttcgtgtaggatgttccgtctactaataccggattttcatttaacgtagtgatcgcaaagacagtaccttccaaagtggcagaaccctgcggttttgcttctccggtctcgctgtcacgtttctggatcttcactccgccacggatgacagattcttctatggtagaagactggtataccgaaaccatttcctgcttaccgtcacctgtaattttctgtacgaagacagttggattgagctggtatccggcaggggctttgctttcctgtaccgttatggtaccgagcggaagacagacggtcttgccatcactggtatagtaaaaggcatcgccgcttacaaaggaatctttggtaaaatgcatctttccggaaacatctgtttttaatacccaggtacgtgccggtttctttccagcttccgcaggatcactgtcagactgctcggtatagaacttgactgtaaattctgcgtttgcaagggaagctgctccctgtggggaggctttctttgtttcggcatccagcttttcaagcaccagattcatgggattattctgcggaatatctgttacgtttgcagcagaagtctgttctgcttttacggtgactttgtgagctttggtgtctacaatgtagcctttggaagcagagagctcttttatggtataatcgccttcctccagttcgccggatctggcatacccgttttcatcagtggtcagtttctggatgagcttctcaccctgatagatcccatacacagcaccctttaagctgtaattcggattcccgtccgatacgcttccgttggcagaagattttttcagttcgatccagccgtttggaacctgataccagcttccggcaatggtctggctgccctgtcccggaacgatgaatgcccggaagccttccggcgggttcggaagtccctgaatggcactggctacttccagtgctttatcaatataggactgcggggcgccatggaaagctccggtgtcagcggaattaccggcatagatgtaagcgacaaccagatgtccgatgacatagctgttatcatcactccagccactgaaatatttatccttgacgactttatcgtagccgtaaccgccgtttaagtagtagagcgcttttctgagcggggagttctggcttaaaaggtcataggaataggaaccagaggaaggtgttttcttcagtggttccacgcagtaggcagtattgctcccgtcaaagctcatgcgggaggtaaaatagctgccgtaagggatattggcacctgccttatagctgatggtgccgtcggctgcatgaaccggaaaactgccggaaaacaatgcgccgactgcgacaaggactgccagcagcatagccagcgtccgtctggtataggatttgtatgtctgtaacataagtctcctccttcttgaagttcaaatgaaaagggcagcgtcagtgctgccaaaagttacacagcctgtttcttctgtttcgcaaggatttccagaagctcctgccgatctgtggtaatcagctccttttccagattggaagccttaaattccacagtgatgttattgttgttggttgagatcagaccgttgccccgctggaaatgggtgatgttcattacttctgtttccgatagatgcaggatagtcttcacccgctgtgcctcttcatcctccatgttcaggataatcttggtcttgcagttattgatgatacccttgccgtacttcccgtcatccagagcaaagaagtcgtttaaatcctgtgtggcaaagatgccggctccggagtaagcacggatgatcttggcaatctccagtacgaattccgctgcaagccggttgctggatgcaccgatgagctgccagacctcatcgacaaagatggctttctcttcggtacggttttccttcgctttatcccagacataatccagggcaacgaacatgccgaccgttaaaagatcgctggaaccggtcagttcggagatatccagtaccgtatatttattggtcaggtccacattggtctgctggttaaaggaagaagcagaaccgtgaaccaggcggttcaggatatgagccagacgtttggtatcctcgctttccagcaggacattgtagacatcctccagaatgggcatctttttgtactgctccggatgctgcggatctgtcagggattcatttttatgtgtaatcccttttctggcataggttttgattagggcttcatccagaagctgcttctcctcatgggacatatccgggatcagcagactgaagaagatgtgaagcctttggatcttgcctgccagtgcggaggcatccagtgtcggtccgtccagcagttcatttacagaattgtctaccttccggatttccatgatgttgatacagttcttactggcaggagagatctggataaattctccgccgacattccttgcagcccggtaaaattcgtgtccctttagcggagcgatgatgaacacctggatgccttttcttcgcatccttagtgccatggtctgcatggtgaaggtctttcctgctcccgaacagcctaagatacagatgttgctgttcttgtactgcctggaatcaaagatatccgcaatgaccagggaattgttatgcttgtttaccccaaagaggattccgttatcatcgcagatactgtagctgacgaagggatagcagcttgccgccccggaagtcagtacgttccgcttggacagcttaaaaagcttcttgtccagatttgccagcggcagagaggataaaaatccctgctcctgtaaaaagtagcaggagtgtaagttcatatcctgcgagatcaggagctttttcatttcctgaatccgccactgcagttcttccaacgtggaagcagtaatggtgatgagaagattcatgtaatagaaatcttcgttgttggcaagtccctgcttcagaaaatatccggagcggatggcagaatccagatcgtcataatcagtgttggtatcggacgcatcctttaatttggaacggttgatacggatctgctgaccgagacgctgctgaatcttgtcctttggctgtttctggagaaagaaatcaatatcaatcccttccccggcattgacaaggagtgacagccatccgggagttacccggtttttgtagccgtcagacggcacaagcaggtaggaatggtaaagcccattgatctgcacataatgggagtgcttgaaatccacactttccggtgcgagaaactcgttgatccggatgtgatccagttcctccatgcgattttcctttgtataggcggacagtacagtgctgatccggttcgaaagcggaacctccgtacaaagggtacggtttaaaagggtgtagagaacatccgtagtaaattcatcctcattgtcatgggagaccacttcattcccgcactggtatagaaaggttttggcggtctgggaggctgtctcaagagcagcaaggatttcccgttcctcttcctttcggtttgcgttgaatggttcatattcaaagatcagaaagaaccgtctggatactgcttctctggaacttaagttctggacaaactggatgtagtcacgctgcagttcctgacagtggggatcggtttcccgctccagctccagctgggactgctccagatgcttattgatgtctgcttttttggagatcatcttgatctggagtttgacagggctgatctttaagtaactgataaagctgtagataatgccctgctgttccctggcacttcgaagcagaaagttgattggttcaatctccaggatcttcacgtaccgtccgtctgtggtatagacgattccgtttgcgattttttccaccggaagataatcctccaaggtctggtctttctttcgctttttccgggaaacgggttttgacgtggcagatgaggtgtcctccttggaaaccaccttttttttctgctctttttttgcagcccgcttttcggaaactgcccgtttttcttcctcctttcgtctccgggcttccgtttttttctgtatttttatctgtttcgccgcctcttttttctgtcggctggcttctttctgctcccacttcagataacggatatcttcctttgcctgttttttgatgccccgcttggtggaggtatcaaactgccggtgttctttttttttactttttggcggagctggtgcgtccggttcagactgtgggggagccgatgccattactttggaaggctctgccattttttctgctttccggtgtttctttgtctttggctctttgaaacgtggtttcctgcgtggctttccttccggaagactgtcggacctccagattaccctgcggttcactacaaaacgcagggcattcatcaaaaaggcagtgatgctctccccgccgattccaatcagggctaccattgccgctggaagtgcggtcatgcagagaatgatgatgcgggcagtcagggacagcggcaggtggaaaacagggataccgattgccagggaaagaacaatgctttctatggcattgcggatgtcaaaagttccgtttaggatcttgcctttctcaatgaagttggaagggataaaggaaaccggtgtttcttctggctgtgtcatggctgcacctcctttttcgtatctttcgcatcttcggaaggcacagaggcactgccggattctgtgtccggagcttccgggctgtcagaagtatccggatacccgccttcctgcaggtgttcaatgtcctgcgaagtcagggacggcagggaatcatcggtttgcttttcgtaaacagtcgtatctgcagagacctgtaccccgtcttctccaaataaaaacacacccgtcggggtgtgataggtaaccggaagcgtatcctgatcggaaagtaaaaacatcaggcagacggttgtttcggtagggtagctggttttttccggcaggaaggtgatgcttgtctgttcttttttgacatactcttttaggtagacaggaaactgccctttgagagaagcaatctggctgtcggagaaaaatgcttttaaagcatcaaaatccagatattccggcatgggggtatcagaatttgtttctgttgtttcctttgccggttccctgcctttgtttccggaagcttcttttttctggcttttccagaaactggggagaaccagtccggcaagcagcagaaacagcatcagaaaaatggaaagaatcacttttgttctgttcataatggctcctttattttttgtcgaagatccagtaggcatttgccgtagcatggatttccgacatcatatcaaattcacggttaatatagttctttgcgtcactgtcattgggatcattgaccagtaccttgccgtttgccgtaacacctcggagtacgatgaagtgtccgccgctggtgaaaagtcctgcccgctgagaggagatgaccggacagccttcggagagtgcctgaagtaccgtattggcattgctggtctgtgtgacgctgccacagccgaaatgactggctgcagcctgaaagtagctccagtaggttccaactcccggcttgtaataggaattcccgcaccatgccaccgcatccggaggggtaatggtattcccggtcaggtagctggcgatcatggcaaagctggtaggcccgcagccggaagatgcgatggagccgccgccataaggaatgttcccgtaatcggtctggagatagtgcggaatctgcattccgtttgccggatagcttccgccggtattggtaatctgataataccggagaacatgctccacatattccttgtccccataccggtcataatgccagttcggacgggcacacatcatatccgaataagcaatggcgttttctttggtataaccgccgtcacgttccattgcccagtcgatatagccggagccgtaattgtaaccctgaagcgccagcttgatgcggtccaggtcggtaggtccggtacatcctgctttatccagtgcatactttaattcctgaatcccacattcgatggaataagcaggatcggtgatgccgttggggacatgggggtatttcttattaaagccgccttctgccgcctgcatgggatcgcttccacgcccgccgctttcctgcatcatgactgccatgaggagttccacataagcttccatgccgtatttctgtgcgacctgctggatggtagcccggtaagccagcacctcatcgctgacacctaccgccatggcaagaccggaagcggagccgccaaagaacatggtcaggttttccacataactgtctgccgtttttttctgcttatcggtcagatgaaagacgtgatctgcaaagtaggcatctccggcatagctgaccgtgtaggtatggcgggtaaaagtaacctttctgggtggtgcattttcctcttccgccggaacttccaccgtggccgtttctgaagtaacgtcataagaaaaaagcccgtcctcgttttcccggatcaggcttttgagtttgctgatatttatatttttatagtcatcctggctggcacaaaactgtgcgatgagctggttcgcatttacgatgatactggaagcgtaaggatcgctgatagaggcagtatctccttccgggagtctggcaatttccgcattgatcttagcaagcagtgcatcatggctttcctgaagcacctccacgattgcctgattggaagcccggatattttcactgattaccgtgttgctggtcagtgctccggtattttcagagaggtctccgaagacgagtcccggaagcatgacaaggaacagaatgggaagcatcagtacaccgccgacggctgctccagttttcgcaagggtgcgcctgtgccggaatactgtaccgatgacagcaagaggactgcccatcaaggctgtttttggcatgttacatacgctcctttcgctgtggggctggcggcagtttctggacaatggattcattgtaggctactttgccgctgccggaagtatatggtgttttttcgaccgtatcctgtgcatactgcttgtaccaggtggaaccatccacggactgtaccgtagagtaggagccctgagtaggagctgcatactggtcggcatggtacagggcaaaatcccggtttccggagcttccggtttcggtaccggtgatccttccgccaccgatttctacattatcataggaagaaccgccgcccggattgatgcccatataggaagtaaaggctttctgtgcgtctgctcccttgatggaacctacctgaccgtaatttccctgtgcaatgttgctgatgacctgattggcaaagtctccgcctttgttcagggatgactggtagagcatgtttccgatactgctgtgttcggtataaccggttgcggaattgaccgcttctctttgtacctgtcttcccactgccccggcaagcccgccggataggaagcttcctgcgacagccgcacttccgggagaagaggctttgtggtagccgccaccaccatgggaacgcatggaaccggtcaggctccgtcctgcaatcagaagttcagccatcatgtttcctccggtattgccgacattgatgccaagcgatgccagaaaagaatcaattttctgggatacctttaaaaaggcaatggcacacaggaaccagacgaagacatttccggttaccgcttcctttccctgactggcaactgccgcttccacgtctgcttccgtaagctccgctgcaaagaccggcatggagcaaaacagtaccagacaggcagttagtaccaggaatggtatgagtttctttctaagtttcattttggtcctcctttcttatagggataacggattggcaaggaaggtgccgaccatagaagtaaacagccgcaggcaccacgcattcatcagaagcaaaaagaactggccgccaagcatccggcaccagcttttgaagatatttccggttgactggctggcacccatggaaaaagctgccggggctgtgtagaccagtacccccagaagaatatagcgttctgccgcttcaaagagcagtttgatgtagttccacgccagaatcagtaccagaatcagtgcaatgatggctaccgccccatttgcacagactcccaggatgactgtgactacggagttaaaatccgcaaattttaaaggcggcaggtcttccgtcagaatccagttgtacggtgttcctgaaatcttcaggagcagatccacaatatctttcgcatagaaggtgagaaagataaagaggaaggaacggatggacagcttaatgggatcttccgcttcgataccggctcccataaagtaatttttaaagagctgccatacccagtttaagaggatcagcccgatgcccagtgccagaaagacctgatacatggtctcggcagcaggaaagtagcgaagaaacgtatccatggaacagcccagagcaccgaggactgaagtggtgatcagatccagaatgttcatgacctgttcggcaatccattccacgattccgtcaagtattcccatagtggcatctcctttcgtctatccgttccattttccgcctgcaaagaacggggtgatgtaagccatgataaagccaagcccgtttaagatcgcccaggtaatgacgatacgcttgagccatgcacgtgattcgtccacggtttttccgcttttggaaaaattcatcatcagaagggcaaccgatgccgttacgactgcagcaatggtggaaatgaggataatctggttatagacatccttcatgatctcattggctttggtccagatggtagcggcaaaaaccggctgtgtgtatccgcagaggactgtgacagccagaaatgcagcatacaggcatctgccataattgacatgccgttttgtgtccggcggagcgtttttcagtttgtgtttcacgtaaaagtacctcctttttataagagcggcaggagaattacctcccctgcctttgcttatggttttcctgcctcaagaaaggacgcagcccggtcaatgcaggctgcgtcctaaatcaaagtatgaaattgtaaagatcctcctatcttacagaaaaaacgcagcttatttgccgcaggagaggcttcccatacggcagtgctgcgtttcgttctgcatataattttgacaatatcaattttaacatgggtaaattaccgctacaatcgcaggactgtgccagttacagacgatggagtgccaaaaatgtgaccaacgctaaaagcgttataaatgcaatccttatggatactgtaagcgtgatttgcaaccaattatactggatttacatgactaatgctttaagcgttagtgaatactggaaggaggaggtgtgcgtgtgaaaggaatgggaaaggcaatccgcaggtacagggaagaggcaggaattacgcaggagagactggctgaactggtggatatcagtaccaaccatctgggtgcgattgagcgggaagtgaaaacacctacgatggaaacatttgtaaagctgttgaatgtattaggtgcggaaccgaatgaagtgctgaaggaagtgattcctcttaccagaatggaacatacttctgtagtggaaggaaagctggaaaggctcacaccgaagaagcaggaaagcgtgcttcggatgctggatgtgataattgaagagatgatgaaatagaagctgtctgcgaaattgccgcaggcagtttttttgaaagctgtatatgcaataaaacacataaaaatatgcgatttatgatgaaagtgattgcaagatttgatatagtaatcctaaaagcattataaaactaattcttaaaggatgactataatatgaaaaagggatatgtgggattattggcatgtgcgtcaggaattctgatcggactgggaatcagccggctggatctgacaggttatcttgaaaaaacacaggagcaggaatatcacccggtagaaagaaaggtgcctgaatcagtagaaagcaagctgaaagatccaaaacagtgctggctgtgtggaagcgatgaacggagtatgatggattatttccggaagtttgacgatctgggagtgatctgtaccaatcactggtatgtgatggatatgcatatccggaatcatgatgaggacgggaatcttaccggcccgcagggaaacgggcatatgggttataccgggacaggagaaggcggctgctttttccatacggagcagatgtcggattacgggatttccgaagtatcggtggattacggggaagatagtatcttcgatgtgaaaaaagtacagaaccatctgtgtcaggaatgcctggataagctggtggaaagcatggaggtattctgtgaggaaacgcaaaaacccaagccccgtgatctggtactggtggattttcagacattggagctgtacgccattcaggagcataatgcgggatactttatccgggattattatgtggaaattgagtcggaggaagatggggtggaagtaaaggcattttactgcccgaagcttaataacgggaaaaaggatggagaataaattgaggtttgcattggtgaggagtataatgtaagtacgtgttatgtattggaaaaacttgaatttagcagaaagaaggattgttatgaaatttatcaatactagaaaattcacatggataatttgtataataggatttttgcttgctcttgtaagtatatttttcttaccgagtattattccagtacattttgcaaatgggattgcggatgattatggaagaaaaatacaaatatttttatttcctatattacaagtgcttatcacttttttgactggacgagaaaaagtaaaatattgcctgacacattcaaaaactttcttaacggacattcagtttaattggatgatagatggtgtacttttattggtaatgtttgcagaaatatgggttatctatgcttcatttgcatagaaatacttgcataacaatttacatttgattgagcagataaaaatgatttgaggtggtagcaatgaaaaagcgattgggaatcatagccggaattttaggaattgtattggcagtcattggcattgtactgaagcagaaagaaaacacagccgtttctgttattggtggtgcggatggcccgacttctattttcatagcagggaagttaaatggtgataattttatttttatgattgtagttggaattattttattgattttggcaggagttattttttacaaacgtaagcattaagttacagttttttagactgtgtatggcggaagaaccgggaaagtgtagatatatcatggggattttggaaaaaaataaaaaaagtaagggtacagcgtttgtctatgatgagaataatgattactataagatggaaataaacgggattgaatttgtctgtgacagtatacattccgattatgagaagcatgcagttgaactggcacaggcgtatgagaaaaggctgccggatatcgtggattatcttatgccggatataaaggagatgtttggaattacaaatccagatgtaatagcaaactcactaggaaagccgagtatagatttggatagaggaacactgacttatctggagcacacaatggacagcctacatattattgaaatggaatttgacggtatcttcacggcattctataactcctgtattgatggataggactttagtaacatagagctgcagttgtctacagcttttatccagacttcggatgttacagagaagcaatcagaaatggattgatcgatttctgaagcagtatccggtgaaatccttgaacatatgaaggaaaagtatgtatgttaattttatttttattgtagacaaaagataggactgatatgataaaagaacaggttattacaaatagaggtggagtatttgatgcagaaaatattattactggaggatgacttgaatctaaatcggggaattgccctgttactttcacgggaagggtatgaggttcgtcaggtttatacaataaaggaagcaaaagaagcatttcaaaaaggagattatgctcttgttatcagcgatattacattgccggatggtacaggactggattttggaaggatggtacgtgcaggtggagatacatatcttatctatcttacggctttggatcaggaaatagatattgtaaatggttatgatacaggggcagatgattatattaccaaaccattttcactgatggctttggtgtcgaaggtgaacgcattgatgagacggctttctaaggtacaggcacagattatgtcttccggagagattacggtgcatatgaaaacgatgcaggtgtataaaggggatgaaccagttactttaagtaagaaagaattctctctgttgctgtatctctgggagaatgcaggacagattgtttcaaaagaaagtatcctggagcatgtatgggatatagacggtcaatttgtcgatgataatacggttactgtcaatataagcagactgaagaataaacttggaacagaagagatagcgaatgtgagaggactgggatatatatggaccggaaaggtaaacaaaaattaaaacggtattttatcgtatatgtaatctttgcagtattttttacagtaggaatgtatctgataacaaagtatgaggaaaatgcgaaagcaacgcagatagcactgctccttgcagaacatcctgaactggaaggggaaatagttgcaatctgggaaaagtcaggaacagtagattttataagagaccgggacgatcagaagatagaaagagtcgtacagatgctggaagaaacttatggttatcactcagggagtggatcttcagatgtggttataaggattatctggggaattggattactagtgggagtcatagtatgtagcctgttcttgtacctggaccgaagaaaaaactggagcagatacggtgatgaggaacaattacagcaattatatgaatgtctgcaggaattcagaaaaggaaaattccaaacatatcctgaagaaacatcagaatcggaacaatggttaaaggtgtgggaatctgtaaaggagctggggcaatatttcgaagatttgaaggaacgtctggagcaggaagaaaatggtacgaagagtctgattacagatatttcccatcagttgaagactccgcttgcatcactccggatgagtcatgagctggtggcagaaaatcgggttacaggagaagaacagagggagtttctggagcaggaatcacaggaacttaccaaactggaacagctcttgaatgaactggtaaatctttcaaggctggaaacacatatgatccagatacattcgcttcatgaaagcctgaagaaaacgctaacagaggctgtcagtcagatttatatgaaggcaagaggaaaagatatttccattcaggtggagatggatgatgatatagttgtgaaccatgattcaaaatggacggtagaagcattaacgaatatccttgagaatgcagtcaaatattcaccggaacatacaacgattacagtgaggacgcaggagctagcaagcaatgtgcttattgaagtagaagatgaaggaatgggcattcctgcggaggaactgcataagatctatcagagattttaccggggaaggaaagcaaaggaacaggtaaaagacggagcgggtgtcggtctgtatcttgccagaaagatcatagaagaacaggggggacaatagcagccaaaagaaaggctgagaaaggtatgatatttaaagtgacactgccgctcataataggagaatagtcggaacccttacaaaactgttatggttgttgtaagggttttgtaatgcaggaatgttatagtaggggtatgaaatggaaaggggacttgaagatatgagtagtattttaaaagtagaagatctagtaaagtattatggagaaggcgagaatcaggtgagagccgtggatcatacaagtttacagatagagagaggcaagtttacagctatcgtaggacgttccggctccggaaaatctacacttctgcatctgattggagggcttgacagaccggattccggcaaagtatggattgatggaaccgatatctattctcgaaaagatgataaactggcacagtttcgaagaaagaagataggatttatctttcaggattttaatctgattccatcgctgaatgtgtgggagaatatcgttcttccgctgggacttgataatcgcaaggtaaagccgcgggaagtggaagatattctcaaaaaaatcggactgcaggataagaaagatgcgatgccgtctgctttgtctggtggacagaaacagagaactgcgatagccagggcattggtgacaagaccggcgataattttggcggatgagccgacgggaaaccttgattcccagactgagctagaggttatgagcctattgaaaagctgcgtgtcggatttcgggcagacgcttatcatgattacccatgatgaaacgattgcccagatggcggatgaaatgattatcattgaagatggcaaggcggtgagaagataatgaagatgacgaccagagttgcatattgcaatatgcggcattataagagcaaaaacatactgattggaattgccattatcctgacaacattactgctgttcgtaatcccatcaatcggaaaagatatggtggaagtgaactttgcggtaatcaataagatttatccaacatggcatgccctttatcggaacgtggacgagagtacagttatgaaactggcggcacatcatgatgtgaaaacttacggactccgcagcgatgcggggtacatgaatctggaagatgcgacggtttccatgatgtatatggacagaacagggatggaactttataaagtgaagctgaaagaggggcaacttccgcagaaagaaaatgatattgtggtttcaaaaggaatactggaagcattaggacagaatgggaaaatcggtgacactatcacagtaccttatcagattctgaaagatgacggactggattatacgaaggagaaagactttcgaatctgtggttttttagcagataatgagagcagcaaagaacaaaaacaatatacatcattggtttcagaggcctttctgaaagcggagataccggtagaacaggtgaaatatcggtttttacttcaggtgaatggacagaaaggaaatacgactgcagattatacagagacgatacagaatattgccagacagttcgggatttccgaggatgacatgaatattaataaagagtatcttgcagcaaattatgtggatccggctacaattccggtgattgtaggaatcatgcttattgttgtattggcgggcattatcacaatttatagtgtttattatgtatctatgaaccagagggttcgggaatttggaaagttaaaggcaatcggggctacgaaacggcagcttagacaaatcgtactaagagagggaatgggagtggcgttgtttgccattccgataggacttttgatcggaacagttgctgtgaaagttgtacttctccagtttgtagaacatgcaaaggattcaaacgtacttataacagaggcatacaaggttgtagctaaaggagaagtccaactttattattggtggatttatctgttggcaattgcagtgactctgtgtacagtgtatctgtcactgatgaagcctatgcgtatggcggcgaaggtatcagaaatagaagctatgcgttaccagggaggcagtaagcgacagaaaagcagcaggaagggatatcaatttctgaatatcggacgactgaccaagagaaatcttgcagagaataaaaagaagagtactatcacgattgtatctatggccgttaccggaatatttgtcatgatggtagcaacggtgctgtcttgtgcaaatccgatggaaagtgcaaagagttcgattgtggggcaatatgagatttctccaattgtggaatccgggaataaagagcatcctgaatatgaatgggcggaggttcaaaagaataatccattaaatgaaggactaaagcagcagatagaggagcttgacggtgttgagcgggtagatgtgtttaccgcgttgaaggtatcaggaggaccttttgaagaaaaaattggaaccgaatttatcaatggagtgccggaagaatacgcagaagagctgaaaaaaggaatcactgaaggcaatgtcacatacgaggaattgaaatccggggataaagtgattctggaccgcgcgctacttcactggtatccagatattaaagtgggagataagctgaaactcaatattcatgatggagataatacctttcaaaaagagattgaagtggcagcaattggtgaatatggaagaggtctgacaaactataactgtcttatcatggcaaaagaaggggcagagaaacttaccataaataattcttccagctattttcaggtgattgcagataaggattatgatgaggcactggaagcatctctacaggctattgtggatggatcaggcagactgcagatgcgtacctggaagaatgagtacgatacatgggaaaatgccatacagatgactagaggtgcatgttatgcatttatcatcattctggcagcaatcagcattatgaacttgattaacacaatgatcaatagtgtccatgtgcgaaaaaaggagcttggcatgatgcaggcaatcggaatgtcggaccgtcagttgatgaagatgctccagttggaaggtatattctatacagtaggcactcttattatcagtatcggagtgggaagtcttgcaggatatccgttgtttttatatgcaaagcgtacaggaatgtttgatatcagcacataccattatccggtaacagcagctattattataattttaacattgtttgtgatacagatgttattggcaatattcattgcaaagtcagtaaggaaagattcattgatagagagaattcgtttcagtgagtaagaatataaatttctgatgtttaatgcaggtactaatcaatgtcgtaataaaaagggggacttgatttctcaaagcccccagtgtataatgaactcaagaaaggtattcagatgcaaaatctgatgccctcagttaaattttatattctatgtataagacatagcatccaaaactttcctagggtcgtggatgctatttcttattatgtcgatctatataagtcaaagccgcaaaaattaccaatagtaaagtcaatacttccattgtattcatgggcatcaccctcctttgttactagagggcaagatcgaaatgcatccgtctttccagttcagtaataccgaatcagtataacacgttaccgttttcagtacaataaggtaatggtctgaaaaatactttattctgtcaccttatgtagctgtatcgtgtgtatttgctggactaattggtgctgtatatgaaaaaaagctatttaaaaataaggtggaagccttatatggtctgcttgatgatgcgggtgatgatgccgagggcaacattacgctcttcatcaatatgcgtcaccacaaaggatacctgatcctttttcccgactgtccggttgtcatagcaggagtgggcaatggcattgacaccgatggagagccggacaaagacggtgcctttatggatgtcttccacagttccggcgtattttccctgaatcttacattttttcatgttttccttgctggtgttgccttccacacttttgacatctgcgtggacaatgacctgctccggtgagtctgcccgcacatccaggatgcgtaccaggatgtgatcgcctacctggaagcgttctctggcatcacccatccagtcgaaggacaggtctctggcaagaatggaggtttccacaccgaaaatttctgcccggactaccttttccgcaacggcaatgactcttgcctgcacgatacggtcttcataaactttcggcattccggaagcatctttatccagatagaagatctggcgtttcttcagcatcgcttctttccggctggcgacaatgctgcgtgtcttcggatctaatcccttgatcagaaaatcaatctcacatccaagcatattgttgaggattttgttctgccgcagggcaagctccccataatcgtgtgcttcatcctgcatgagatggatcatcatctcagttaccgggatgacagtacggaaatccttgtagtaaaccacggcaatgaggctgccgttttctgttttctcgataccgccaagcattccggttaagatccggcgggtacggtaggcattctggatctcatgccaggtaaggtctgaaatggactgggctgtttccagctttgtatcggaatccagagttaaaataggtgtgttggttgtttcgtttggcatcatagtgtctcctttcaaattatgacatgatagaatctttatctaaaggaaccatgtctgtgtgatacggatagtcatctgctgagaagtcatccgggaaatcgtgatagtcaggttcctgataaacgctttgctggtcaaaaatcggttcagtttttttctttttctgctttccataagaagcagttctcttcgggcgggaagcaggaatagtcggagtgtacgtatattcttcactacatgctccttttctccattccggaatatgctcggaagccttccggggaatgagtttttgggcatccgggtgcagggtgtaatcgtatttttctacctgcagtactttctggccacgcaggataatcagtgcggtatccagaggcaggcgcaggatctcatccggagttaagagctttcgtttcccgatggatctggtctggcggtattccggtgtataatcggatactctccagctatttaattgtttggcttcgctgctgacaccaacggtcacatcaccggagcggttagagataaatgtagcagttacctcatccgtacagcctaaaaatagctgagtgtcgcagttcccgatgatttcctgccattggtttaagggataccggttctgcatctgaggcaggttctggaaaatgcaggaaatactgaggtttcgacttcggattacggaaatctttttgttgagcgataggattgctcccgtattcgccagctcatcagccaggatatgtaccggaatcggcagttttccatcttccccataggtgtctgcataacggaccagtttgataaatacgaaggtcataaacagggaagaaagaaaatcaaaagtgctgtcctgatccgaagtgatgcagaagtatgcacatttttcttttcccggcagcgtcaggttgatctcatcataggaagtgatctggcggattagcttattctggaacacctgaagtctggaaccgagtccgatgatgacgccggaacgtaccgtgtcacttgcctgtttatagatgcagtaggggacttttgccggatgggagaccggaagcaggtcaaagaggctgttcagttctttttccgaactcatggtcaggagtttgtatacctgtccgatattctttgcctccggtgggaatccctgatccacatagagaatcagagcttttaataagttcatctcggcattgtcccagaagtgatcgcctttggcagaaccggtattctggatgatgacatcagcaaatacctgtgccatggtttcctgtccgctaatttcacccagacaattccagctatccgagttttccgggtttacaagattaaaggatttcacgatatatccggcattctcaaggtaagtggctgtactttcgtacaattccgattttggatcggtgatgatgaggctttccccgcgggcaacacactggaagatcatgttgcgtgcaaaggcccggcttttcatggaaccgctggcaccgtaaacggcaatattccggttcatgcgggtatccttcgggagacaaacggcttttccgttcagttttccaagaatggttcccttgtgtttcttgacatcattcgtaagctccagtacctgatgcatttcctccaaagtcataaaaccggaagtcccataggttccctttgtggaataattcaggttccggtcccggtctgttatttccccgtttcggtcaaatcccatacgcatgagaaggaaggtcaggagtccaaaagctgccagacatagaaaaatcccatacagattgtacgggaaagcagtcagggcatccagacaggcgagcgggttcggggaggggatctgcggggcagttccgtttccggcaaaattgccggcagattcccaggtctgatagttgcggataaattgagcaacatagcctcctgcatagagggtgcagaaggtaatcggaagcatataaatgagcttccaccatttacggttcatgtaaaaacccccttttgaatttgcaaaggtcaatactggagaaatggattgtggcagataagtattttttcaggaccggaatctgaaaatcgaaacagatcaggttcccggatctgccgtatacatttaagccggtattgaaccggttgattcgctgcatgtcaaaatcataagcaagaaggatggggttcccggaagcatccgtggcatcatgttccagtggaattgaatcgctgcggcagcccagatcggacagcaggaggttgtccagcttttccatgatctcagggtgaaccagcagttttaaaagcacttccccttccggagtattgggaaggtaatggaaatgctcgaaggaggtgtccagcataaacaggctctttttgtagcctccggtactggtaaacagccggaaagccatttccatgtcggttccggtcatgattgcccggatctgtggatgtccgttgtaagggtagccttgcaggtaatgctgcaggaaggcgtttaagcggacttccgttcgatattcccatttcaggactccgtttcccgtgttgtaaaggacatagacacattgcggtgccatcaggatgcccatgctgcgggagttcctaatcttcgtggtctccgggcccaattccttaatttctctggaagcgtaaaaaagaggaaggcttcgcataccgatggaaccagcttcgcggtgattacagaagatgtcaggttttacatccggataaaagggaatcccggcatgaaggagtgtcagatacgtttcggctttctgatgtaagcggatacgtcgggatacttcacttcggatgaggttcgtctcggtattgccggtcagatagcactggaagcgtaacggcgagacagataacagcatttctttcgcagcttttgtaagacggtagcctctgagagcatcccggtagtgggtacggatgaggtgttccgccttcaaatccgtaatgagtttttccgcataggaggcacttgggatgagtctgtttagctggtctgcgggaaattccccgcacatccctatcatttccagtaagcggtatttcgtagtgtcaggtcttatcaaataagcatcacctcaattcagttcttacccatgcaagcctatacttgggtaaatctccggtggtttggagataaaaaaagcaagaaaacaaagttccctgcggtggttcttaccgatgtcggatttctgcctgagaagtcaggagattttccgacatgctttcgtgatgatttttctggttctgcagccatttcggaaagtcagctttttccataaccgataccagtgtacagtcctttaagccaagctgtgtcgtgtagtaggaatcacagaaaaagccgctgtcatctgtcagaacataagtacaaagtgtatccagaatctgtttaaactccagattgtcataatcccggatacgtctttgaggaagttccctgtcatatatttgactgaaacatatcacgcagtcacgatagaggggcagggcattttgttttacatactcccgaagcatataattaagcggttcatggagaaatgcagtgtttgtgtggactcttcgtttcggaagcagtccgggaagcgtaatggtgagaatcccctgctgttctgcaatccgcattccctgtgcatctgccgctttgggaagataagctgcttgatttggggagagagccggacagacaaggttacgcatctggcaggcaatccgctccgcccgaagagcagcactgacgctcagttcctcaaaatttttatcataattctggatatcagtgaccttcagagcgtaaacggtattcgtcagtttttgcagctccccttccagtttttcaagccgctggtaaatggttggtgtattttgcgtcataataacctactttctcatgtagtaactgacagcaccggattcatttacaaggcagtaagcggctacatcatcaatggtgattttggcagcctggctttcggattctaagacaatcaggcgtttggaaccatttgatgggatactttccatcacatgattgatcagagcctcctgttcttcaccgatatagatgatttcgtattgttcatcttgcgaaaagaaattgagcttgattggaaattcgccactggtgtggtatacaacacctttcttaaaatccagcagtacccagaagcatgtaattatagcatagtcaggattctcagcagactgctggctgtcacaaagaaggtcatgctctttatcgtaaatgatgcgcccttgtttgatgaggctggtaatcaatgacttgatagactgctcatgtcgggagaaaagttgtaaaacctggtcatacctcagagtatggtaagtggtaatgaaccgtaagagcttggctccctctccttgatagatttcgttccttgttttcatgattgactcccttctatatataataggaaactttatatgtatggctgtacgtacagaatacgtttggtattgtaagtatagtgtacgtacaaagtacatagaacctgctgtcagcgattgaatttacaggtacaaaaaaagcaccatctatgggtgctggaaataaggaaaactataagcaatacctattgtagcatgggtaattttacgcttcaatcgcagaagcaggtcatttctgtgccattttcactggttggcataaaaaaagcaggaaaccattttgattccctgcatggtgtattgttgtgcttttgtgtagttctaatgattacttgtctttataaaatgcttcgaaagcttgtgcgaagaattcggctgtaccattgccgtatttttcatctatcataggtttgattttttcattacggtaatattgagcctgtgcaaccatcagaccgtgttctttctttatctgtgaaagttgtttcataagaaaaccgtattcggaaacaagttctcttacttcagaagaatctggtgaacatacttttttagctgctaatttgtataaaagattgtcaaattgttggttgtaactttctgcagcctctttgctaataggattgttggcaacagacaggaattgctcttttcctccataccactcaacaactttagcatagcctttctgcatttcttctgatgaaacggtcttaatataatgctttttccattcttcaatgcttccaaactcttttacagcaagttctttcatattgtcaggcatatgttcaaacatagtttggaacatttcttcaacttccgttttactaaaaatcgcaaaatccattttattctctcctttcaggatatcatcaatgctggcaatcagatgttccatacgttctttctttgctaccaacatttttctctgcatttgcaagatctggttcctttcaagagcaggattctccagaacagctttgatttctttcaaaggaatgtcaaactcacggaaaaacagaatctgctgtaatatttccaatgccctatcgtcataaagccggtatcccgcatcacttttttgtgttggttttaaaagcccgatttcatcgtaatagtgaagcgtgcgaacgctgatacctgtaagttctgatatttctttgactgtcctcatagttgctgacctcctgttcctgataagataactgtacgctatgacgttccgtgagagtcaatatatattttgcattttttagtataacatttttatgatattacgaaaagccgaggagataggcgatatgtattactctggaaagaacttgttgagcgtatccaatgtctcttttgcagtaaatccccaaaggatggtactgagtgcttcaatcgcagccctgcgtttccggtaataggtgcggtaggaaatattggtgatgtggtgagccagcttatccaatatctcatctgtatttttcatttcctgtggagagagaaaagcgtagtagagaatccagtaatactgttccccatgcttgtgattgttccggaggagatcgatggatgattccaaaagcttcagcatctggttgcttctggcaatactttttgcccgttgttcgatgtcgcttccggtaagatcagccccggcagcatagatggagtccagaaatttgtcgatgtcattgtcgtattggagcttaaactggtgctccatctggtgtacgactaccttcaggctgtaggttgcatcccggtatctgcgtaaaaactgataggtgtcgtgaaaacgtggatcttcttcgggtgaaggaaatccctgtgtattgcggtttgccatgtctattccccccctttcagtgcagaaggctctgccacggcaggcatcttttgggcagactcatcccctggacttacggacaactcaaaccgataagcggcatttccgtagggacagataatatttagagtaaatgtattaaatatatctttgcaggctgataatggagataatatatagcgggttttggagcagtggcaacatggaatcccttgtgaatccaatagttctgcgactttttgcacgataaatttcatgtgtgaatctggaacgcaggaatcattttttgtaacggtgatttgtgagtctgtgacagtttctgaaacgctaacagaagcagaatcctcaatagtgatttcttcagttacatggattggtaattgcatcttcatagcgatctcctccttgtcaatcataacgtcgctgatattaaacatcacggacaggtaattgttgagataaattacgcttccgtgttttcctgtaaatgagataagtgtaatgtattctttttcctccagtttcttcaagagtcgtgataccgatgcctttgacagactccacctttcacccagttcattaaagctggtaaggggatttccggtattatcccggtaatagacaatgggaccggaatcagatcccaggacagaggaatcgttgtaaactgcatgaatccacagatccagaataacatccatttccgagcattttccaatgccaattagttcgtgaactttggcaatcgggaaaaagaaaaaccctgtatcttttttacagggatagttgtattccaatacggtattgtctttgggccagtctgatattttgaatttgaccaggcggtttttgccgagaagagagtaggtaatgtaattctgctcttcaaaaaatcgaaggatggacaacgcttgatgttggaaacggcagcgaaaccattcctgaagatctgtgactgtgcagatccactctcctggaccaatggtataggtaatgtgttccatccggcggtaggatgtgcggtaatttgcataggagcataataccagataataaaaaagaaaagagcccccggtagttcggatgctcttggtagtgattaaagtttgtatgaagtcacggtaaatgcgacagcgtggaaattccacgatttgtttgagttctaatttgtaattcatggtgatcttcctttcaaagtatatttaattgtaatcggacttttcatagtgttggtatcaagaagaagccgatggaagtatagcaagtagtcgtgtcactcattgcatttttattgcatttttaaaatttagattatgtggctatgttgctcttaactggttaaaaagcctttaaaatcgtctatatgcgttaatactccgtactgtctgtctggaattcgagtagaggattaaaaccccgcaagccagtaattacaaggcttgtggggggttcttctgcccgaaaagtaagattttattaagactttctgtaatgtgcttatttagcttgctcgctgccaataaggattttacaaatttcaaatcccaaagttaattatttgacctaaattatctatttggagaatttcgagatgaatttatctgaaacatctgcccattcatccaatcttgaaacacattttatcaggttgtctatataatctaattcattgatatttaaaacttcaaaaattatccgtcggcataacaaactcatgtttaactttcatagggatatttttagaagtgggcttaaaacccttatgtattgggagtttccggcagatgcctatgcttcctcgttggatttgttagtatcagttgcagtttctaaagctgctttttctttttcagcatgttctttctcagccttgcgtcgattgtaggtgtgattccatgcacgcttgcgacgttaccgttcttcttcggctaattcctccggtgttagctctggcattggaacatccagtttacctacatatttgagataaatgtcgatttcctgtgtgcgttccccggttgacttgtcagcctcatgcacttcgattcgttctataaattcgtgaatcattggtgtagccaatccagaaaaatctgtgtacttatgcagcattgcaataaatttatcggcattcgaagcttcttcttttgctgtagctaactgtcctctggcagtagtaaggaattcttctaattcagactattccttttcatagtcagcagatagcatatcgaaacgcttatcggtcagtatcccggatacattatcttcataaatacgttttatcaaatggtcaagctcagcaacccgcttttcggatttggtaatctttttagtgagagcctttgtatccgcttcctgtttcaagatgttagatcttctaaccttttccagaatttcatcctcatgctctttgatatagcttgctgtatactgcaaagttgtcaaaatcatgtgtctgaccacatctgtccttacgtggtgctgggagcatttgttttcaaaatgtccctttgccttgctataggttgagcaggtgtaattattctgggcattggcatattgggaatgcttgtccttgtaagattccttaaaagttctgaaatttacagtatgccccatatattctggttttgataccaggtctgtgatggtggtagcagtccaggaataaggtcttgtcatatcgcacttgcctctgcaagtaccgagtccctgcttggcaagatagtaggatggacgttcaatcttttcaactgagagtattcttgcaacctgcatcggaccattaccttcgataatcagttggaaaatacgttttactacggcagcggcttcttcatcaataagccagtgattgttatcttctgggtcttttttgtatccgtagatgacattagaagtcagatgcttgccctccatacctttgttgcgtagcacagacttgattttccggccggtatcacgcacataccattcattcataatgtttaagaatggtgcaaattcattggattcagaatgtgtgctgtcaacaccattggaaatggcaataaagcggacacctttttcacggaatagaaccaagatgactcttcaccattacttactacatcattgaaagcctgctctataacatctaaggataattctgtatctggtacgtaagcatacatagcttgtattttttacattggcatttacctttcaaaatattgtctacaattcctatattgggagatagattagcactacgtctgcttcttgcaagcacctcgtcaatatcatcggagacgatgacattggccttgtcgaatccaaagatttcccccgcgtcttttccgacctttttcggatcaacgtctatagcgcataccagttccaggcttttcttggattggatcattattacagcataacgcccgacgcttcctaatccccatacgattactttgtacttcttcataataaggctccttccatgattatatacgtgtttacaaaattctgaaatcatggaatcgcattcatacagaattgtcaatattaaatggataaggatatattatttttacaaaatatgttaaaatgagtacattataaaggagttttgtcatgaaaaataaacatcagctacaatcagaaaaaacatatcaggtatttatcgatgcagatcctgcagtgctatagcacgcatgaagaggaactgctgaagcagattctggaagcgcagaaggaggccgcagatcctctggacaaggtacttcaaatatttgacgcaaaagtcatcgtttccttaaagttcgcaaaactgggaagagagttatacgtctgcgccttgcattattatgatgagaatctgtttgatgataccattccgctctatgtgaaggtaaaagaagccttggatgaatgcgtggagaagaaattgtattcattcaatgaggataccaggacggttgcatgggaactgattgacttttccagggggattgtcttcgactattatctgaggcaggagagttatgacttagggtctgtttcggcaaaacggatgaaacggtatttagggacgtttatagaaaagtgacggacttgccagtgcgtggaagggggaattaattgaataacagtttcatgatggtatgggtgacaaggaggccgagtagtaagattgggaggaaaaaggtatgtctgacgaggaaagatttaaaaaagcaatcaaaaacatcaagaacaattataagcagattgaacgatcgaaagtaaatcaactgtatcttgaacaagatttacatccgactacgattgggactgcaagggaagagatttggggagaaatattcgagggcctgatacccaaaaaattcgtggtagaaagatccgtcttcctcattgatgcaaaggataatgtatctttggaagcagatcttgtgattatggatgagatgtatactccgtacatattccgatatggcagtataaagttcataccaatcgaggcagtggccgctgtgatacaatgcaaaagcacgagtgtggataagaagagcctgggagaatgggctgagtctataaagatattgagaacttctgaaagagcagtggccagattagccactatgttttccacaggaccagtactaacgcagccatcaacgcgccccattcttatactgtgcgcgttaaaaactgaaattagcaatgagttggaggagttgtttgatatcgtacttttggcggtaaaaaaaggcaaatcagatattgaagatagttatatcgatgtgcggtttaataaggagtttgataatcttctgaaatggttcgaggcattgaactttaataatattgataaaacggaggatgtgtggaaaaagatccataatgcagataaagcaaagaaaagattgggcggaatgaaattagaggagttccaagtaaatgataagaatggaaagaacatatccctcttatcctttaatctacagttcaaccaactattgatgctgattaataatcccatgctgtttcctcatcaagattatgcaaagctatttcaggaatgtgaggaggaataagatgaaagaccaggttgtagcaatatccattgataagattcaaacggctctttttgaagtgattaaatcaggtacccaggaaaagcagacgaacagcggcacgttgagaagcattatggcggcgtccaggaggatttccggagatttctacagggatgtgggaatagaaggagatgcaggggaatttgcaggaaaggtaaaagaaatattgctccaatgttccggagtatgcatctttactaccacgtgtgcagaagatgaaatctcaaaacgtttgaagagattattcgcaaagttttaccgggagtcaggcggaaaactgattttgaagtatgtactttttacagaggacgtgtcaacggggaatggaaaactcaaagcgattcaaagttctaaggaattgctgaaaagcaaagcatgtatgaatcaggtagtgaaagagaatcaagagattctttttcagtttatgaaataccatgaagaagatataagtgcacagaatgaagagggaggcgcgtttgtccagacgataaatgatttgagagcttctgagcaaaagtccaatgagaataagcaggacaagggaagttttcgaattgtggtgattaaggcagatttagatggaatgggaagtgcttttcagaagatccaagattttgaggtatatcagaaagtgagcagcatcctgaaccaatatatatccatggagtatttagaagaaaaggtcaggggatttcaaataaataatagcgagtttaaagtatatcctctttatgttgcaggtgatgatatcttttttgccgtgggaatggaaaatttaatagaaggtattaatctttgcaaatggattgtcaaagaattaaatagtgctattgaggatacggttggcaccgcatcatttaataaactgacgctcagcattggcttggactttgccttcaaccgggaaccgattcgctactattttgcacgtgtcgaggatcaattgaagaaagctaaaaaagcaaaagcattgaataaaggtgaaagagatcggctggttgcaagaatctgcataaacgatgtcgtatattacgatgtgaagcgagaggagaaaaaggaagaggaaaataccgaagcagagtcggacgtaccaaaatgggaacatgtgattcacggattaaaggtagcaaaaagagcagaaaaagaaggaattgaagtgactgcatttctttacgaattattgagaaaactgaaggttcgagaggaagatccgacgggaataatacatagcaatctggtattatatcatcttttgcctcagtatttagatgatccatgtaaggagaaaagaaaagcagaacttctgttattagaaaatatattaagttttataagttttggcaaaaagaatgagacaaaggaattgaactttgatcaaacttcttgtactaaactggtaaaatatataagtctgcttatattgctttgcgatattagatttaatattagggaaggcgaaaaatctcaagtacagtatgatgaagaaaaaattaaaaaggtatttaaccggccgctgcattatctttatgacaatagtttgtataagttgtggatggaatcaggagtggaagaaagtctagttagcaaaatgagaaagatatttgtaaataaggcgttttataaaaatccgaatccagaggtgaaaagacctgtacaggtttaccagactctgcaaattacaaactccatgtttatacgctttaaaagattcgatatggatattgatgctgcggctgtaatgataaaagccatgaatccaaagacaaaagggcaatatcttaaagaaaagaaagagagaaaatgcacacagccgcctggaaacttgtattttaaggaaaaggattttaagaatatggcagtaaagtctggcttatggaagaaagaatatgtagatgccttaatgatcttttatcggtttaacagggctaaaattcattatctgtcaacgaaataatcattgttaatgggaggaacgagatggaaagaattaagatagaattaacgacgttatcaaatctgtttattggggatactccgtcctcatttgagattggaggcatagatcagtatacgaagaccgatttttataataagccattggttcctgcctcttctttaaagggcgtgctgcgcagaattatcagcgacatggagactgacggtacggcagaggagattgcaaaggcatataaagattattttaaagatttaaaagaaaagaatataaggaatttggaaaaagtggcagataagattgaacctgagagaaaaaagggaattaatgaccggtttgaaaagacgattgaagaggcatctgcggaatacctgtttggagttcagggatttaatgatgctcccaaactgatttttaatgatctggtggtaaaagaaggccaggaagaaagagaattattttcaatagattccaaaaatagaattgatgttgtggaagaccagataaatgcaaagccaagaacctataaaacggtgcgtccaggagttgtttttaccggagatattctgctctatcgaatggaaagacttgggataaagggcattagagagtttgtagaaaaatctttgctggagttcaattcaggtatttatcgacttggaggatctggcagcagaggttatggcagagttcggattgatgtcagataggaggcagaatagatgaaaaaggtagatgttttcgagatttgtatgaaactgacagggcggctgacccaaattccggattcgcagaagatatttggctctatgatctatcattatgcagaaagaaattcggatgagcaggcggctgccttggtaagaaaaatctgggaaggccggctatactgcgcaatttctaatatgcttccgcaaggatatatgccaatgccacaagtggatttgacagaggtagatacttcatcaccggataagatcgatttaaagacacttcacgaagaacaaaagaaacgagcatacattcaggaaaaggacttaaaagaggtcatggaatatcctgagaagatagcagaattatatccatatgtaaaagttaaggaactacagcagattcatgcagtactggacagccatcagtataacctgccggggcttgatccaaacctttattccgttccggaagtgcaggtggtagaggtaagaaaagatgacaaagatgagaaagaatgtaatctgcgtcaatttgttatctatatggcgattgaaaactgctcggaagaaaatgaattatacaagatgctccaagaggccaaggaggaagaaagaagatttttcttaggaccccgtacttctcaggggatgaatacatatgtagtggagcgaattgaaaagaagaaagaagaaaaatgcatgggcaaaagatatctgaatatgggaatgcttttaccagatcggattgattatgacagatccacgcttcgcctgtttacctctgaaagaagaccttataatatgagcgcaggctgggaaaagtctgatgatagaatggtcattagttttattgaagcaggaagtattatctttccggaaattgatatttttcatacaggacgttctgtggcatcgcccttcgatgcccgggcaattgtatttggcaacgcttttttatatccgttattcaataatgaaatggaggggtaaagggtgaaaaaacttaagaggtttgattattatcttgaaaccatttcttctatgccgctttctcccagggcgcaggaggcatgttatgctggcattgattatgatctgggaagtataagtaaaaaggatgaaaaaaacattaacataatctatccattttaccaatatggagagtatcattcagaacagccagaatattatattcccggctcttctattaagggagcgatgaaacgcgagttaagagatgagtttggcaggtttatggtagatgatattccggttcgaagtgaagatattgtattgcgccaattatataaagtgcagaatctgccggaacagtgggaaataaaagaaaagccggaagatcgaaagaagatcatgcttgaactgttctttcctcagatggcaatacagatgctccggcgtgatatttcctataaaggagaaatatatgcagaggaggaacttgacgctttcctggaggagatacgggatggcacgaaagaaaagttaaaacaatttatatatagcctggataggattcttgagaatgtgtatgaaaatccaaagaatgtaaaaagggaaataagctgtctgaaagaattagaagaggcgaggattggagtacaatcgcttatagatacctgcaaacgaaatgaggcactattgctgatgggcggatacaagggattattgctgtcagaattattttcatatagggattcggcggatggaatgctaaagggagcgatctatctggataaagaatgcaatcttccacatggtattgttaaaattagattaggggaagaatatgtatgataagaatttgttttccgtaacctacttgccattaacaattcgattaaaatgctgcgaaccagtgaaacttccggcttatttaggctctatgctccacggaacgctagggtgggcccttttgcctcaacaaaaggtgtatcgctacttatttgaaaaccgaagaagaagtacaggacaaagagatatcgtaaatccatatataatcaacacgccgccacagaaaatgaattatcaagaaaatgatgaacttgtgtttcagatcctgctgcttggcgatgggataaagtatgcagaggactttgtaaatgtaatgacagagacatctgtatttggcttaggggcaggcagggcaaagttcgaactggttgatatacgccatggagtcagccttcatccaatatgggatggggaacatctgtggcagaaagagattgtggcaagtgcattggtagatgagatttatgaaaattgccagtattgttctattcagatgaagacgccactacggatcaggagagatggcgaattgctgactcagattgatatgcctgccattatgcgaaatataaccaggcggatatcagatattgtagataggtatggcggatatatagatagagaaaaggcagaaaccatatgcgatatggccagggaaatcaaacaaaagaatgcagagatatatgtatgccatctagagcgatattccagtagaaaaggcgaaaaaatggacatgagcggtgtgatgggatcattagcatatcaaggagaactcacagcgtttacaccttggctaaatgcggccagtgtacttcatataggcagaaatgtgacatttgggtatggacaggttaacgtcgtctttgcctagcaattgaaatttggtgcgaatgtcaagcaaacataaaattccagggggattcgcaccaaaaaaagatacaaaatggaatggtaatgctaagaatatgtaataaaaactggtgataaatatatgaaataatagttaatttgttggaaattaacaaaaagtcctgtataatattatatgatattgcagtctccacctgtgtggtggagtggattgaaaggaagtatccggagaaagtaccggggtaataatcgggtctccacctgtgtggtggagtggattgaaagctacgccccggggccttgaactggtacgctgtgtagtctccacctgtgtggtggagtggattgaaagctgaggaagaacttccggacatcgtgcagagatggtctccacctgtgtggtggagtggattgaaagatccacgtcccttgaatcagttcagcggcttcttttcgtctccacctgtgtggtggagtggattgaaagttttccaagcctctttgcctgctgatagaaaccagtctccacctgtgtggtggagtggattgaaagttaatttttcacctattgatctatttttcatgatgcgtctccacctgtgtggtggagtggattgaaagatctctacaacgtacttaataccatctatttcagtctccaactgtgtggtggagtggattgaaagagggatgacaatgctagtctgagaaagagacacatgaatcagctggcagatgggctcggtatgatccaccattctttgaaacataagttcaatgtaagcatcgaaattatgtttaaaacgtgataacagggaagtatcggggactttagagaaacctgaaggccgaatagaactcgggtggaataaattcatggagatcaaagtgttctgaaagaagaacaaagaaagagggtaattgtcaatgagtttgctttgaaagtctgaaaaaatatcatttaaagcgatctgttgatatttagcagtcataaattttctcctcctcaggagttgaaatgtattggtgtcgttacctatattttaccacccgtggagagaaaatttatataaatcaagtaagaaaccccagtaaaatcaaggagaacagcatttatcaaatgcctaaagtacacagaataagaggagaaatgagcaaatgagaaaggaagcaagtttagcagagtggaaggcattgtatgaaatcgcaacggaacttaaggagttgcgcccgtgggagtctttctgggatatggatctgatccaactgcagggagaagaagaggaagatgtagcctttgtaagcattctcggaaaagggggagactgctatgggataacggtatatgaggggtatgatggattaaatgattttatgcgcctcgcactggcagatgaaatgaatctttccgttgagtttgcaatgttctcccagaataatctgacttgctattggggaaaccgggaagaattgagtgagaaacagagaaagacgatcaaagaactgggctataagtaccgtgggaagagtcaatggctgtactttatgacttatcaggcaggctattttccatacaatctggatgaggatgaagtgcgaaggatgacgagatacctgggacttcttctggaggcagtgcaatgctaccgcgatatggaggaagtggtagactttaagggaggcgacctgttttgctatgagtttaatgagaagacaggagccaggaagtggggagcacaggccatgccatttaccagttgccagtttcccagcctgacgctgacggaggaagaacttttgcgggaattaaaagaagcgtcgaaaaatgattgtattttggaggctgagtgtacttactccgggtcggcagtaactgataaaaagtatgaccgccctgccaacccaatgctgtgtctcttggcggagaggaattcgggaatgatgttgaaggcagaaatggtcgggcctgacgaggatgcaatggtggtactggctgaaactgtggtgggatttatcctgacccatggagcgccaaaggaaatccgggtaagcaatgtgattatcgaggcaatcctggatcaggtgtgccaagtagccggaatacggttaaggagagtgaaaaaactttcggcagtcagcgagttttgggaaggcatgcgggaaagattctaaggaagaagtaacatacgggaaaaatcgtgtggttagaaaataaatcaagggaatagatgatgcattatagataagaaaaatataacgcatcacctatttcctttttcaatcaatggggcgcatggaatatgataagattaatttaacgcgggcaggcaataaccattgactcccgcattcggacaaacatttcacacagggggaagaagatggaaagaatatactttgacaatggcagcacatcctggccaaaagcgccaaaggtcgcagagtctatggcggaacttctgacgaatggcgcgttcaatatcaaccggggcaattatgaaggcgcatacgaagtggctggaatcgtgctggagaccagggagcagcttaagcggctgttccatgccgcagattcaagaagcgtaatattctccccgggcattacctattccctgaactattttattcaggggttccttaagagcggggatcatgtaatcgtgaccggaatcgagcacaatgcggtgatgcgccctcttcaccagatggcgagccggggcgtgacgtatgacattgctcctgcggatgagcaagggaatgtcagcgcagaagagatggagaggctggttcggccgcagacaagggcaatcatcgcctcgcatgcatccaatgtctgcggaaccatcgtgcccatccgggaaatcggggaaatgtgccgccggaggcatcttatttttgcggtggatacggcgcagacggccggaactcttgacatagacatgcagaaatgcggcatcgacttcctggcattcaccgggcacaaagggcttctgggtccccaggggattggcgggtttctgatatccgaggagctggaccgccagatgcagccctatattgcgggcggaacagggagccagtcagattccttcgagatgccggataatctgccggacaagtatgagagcgggacaatgaatctgccgggaattatcgggctgcatgctgcgctgtcttatcttgaagagacggggatagagaagattcacgacaggaagatggaactgacagagtattttcttgagagtataaaggaattgccgggaatccggattgccggaaggcaggacgtaagacagcgcgtagccgtggtgtctcttgactttcagaccagcgataacgcagtcgtggcatttgaactggagcagcgggcagacattatgacgagagtcggccttcactgcgcgccgctggctcatcggacgctgcatacatttccacaggggactgtccgctttgcatttagcgcaagcaacactaaagaggagattgatatttgtattcggacgctgcgcgaacttgtctgatgaagatatagatgagatatagataacataaataagtatggataatgttgggaattaacaatagcccattccagcaggttgcgttgtccttaataggaaaaaatgatacggtaaatatagtcgaatattgtaaaatacaaggaggacgataatatggacaataatcacaagatgtggagcgacctgggcatgaacctggaactgcatgaccagttatgcgaagtactgccacaggcatttggggatgttttcttatcacaggagaacaggccggaaggcatggattactataacatggtcgtggcggatatccacggaatacgcccggcggaattgatcgagcatcagaacaaaggcggaaaggtcttcggaacattctgcgtctatgtgccggatgaggttatatttgcggcggacgcgattgccacaggcctgtgcggaggctcccagttctgggttccgggaggagagaaggtgcttccgacgaatacctgtccgctgatcaaggcatctgttggcgcaaggcttgacaggacttgcccattctttaggatcgcagatatgtacatcggagagacgacctgcgatggaaagaagaaggcatgggagatcttaagcgaggatgtgccggtctatgtaatggacctgccgcagatgaagcgtgcaaaggatgtcaaggcatgggctgaggagatcgaggccttaaaggaaaaggtagaagagtttaccggaaataaggtgactgccgagaaacttgccgagagcatcaagctgatcaacaataagagaaaggctctggagaggctctataactgccgcaagagcgataaccttccgattagcggaacggatgccctggtaatttcccagattgcgttctacgatgatccggccagattcacgcagatgaccaacaagctctgcaatgagctggaacagaggattcaggacggcgtaagcgttgttccggcaggcacgaagcgaatcatgcttacaggtacgccgcttgccatcccgaactggaaattacataatatcgtcgagaccagcggcggcgtgatcgtctgtgaagagatgtgcacaggcacgcgctattttgagaaccaggtggatgagaccaaggagacggtggaagagcagatcaaggcaatcgcagagcgttatatgaagatcaactgcgcatgcttcactccgaacagcggaagaatcgatgatatcctgcgccttgcgaaggaatataaggtggacggcatcattgacgtgaacctgaagttctgcaacctctatgatacagagggctatttcgtagaaagggctatgaaagaggcaggcattccggtacttggaatcgagacagactatacagacagcgatgcgtcacagcttcgtacaagagtaggagcatttatcgagatgctcaacaacagatagtgagtaaacagaaaaagaggggattgccagatgcagcaactacagcattatgtgctgtttccaaaccacgacaatggcatgcgtctctataaggaattaaaagcgctgggagtgcgggcggtcatatcccccactcccagaactgccagcaaatgctgcggaatctcgctgatggtggaggaagatgacctggaaaccatccagtgctgcgccaaagagcacgacatcgagatcctgaagattgcagcggtggagcgtgacttgaatccgaaaagggaccggtattgctagatattgcgctatcttgacgttatcttgacgggcctgcatatttggagtaatatgaacaggactgaatcagaacgggagatatcgctatggaattacagaatggccgcccggcgtctttggaggggcgggaagaaaaagaaattaaagtatatgatctgctggatcgtcttggcatagagtatcttaggacggatcacgaggcagcaggcacgatcgcggactgtctggaagtagaccaagtgcttggaatcacgatctgtaagaatctgttcctgtgcaatcggcagaagacagagttctatctgctgatgatgccaggccataaaagcttgcgaaccaaagaactgtccgcccagatcccaacatccagactgtcctttgcatccggggaggatatggtcaagtacctgaacgtgctgcctggctccgctacggtcatggggctgatgaatgatactgagaaccacgtacagctgctggtagatgaagaaatattaaaagatgaatatgtgggctgccacccctgcgtgaacacatccagcgtgaagatctgcacggaggatgtgtttgggaagttcctggacgcagtgcatcatgactatataaccgtaacattaagcgataattcccctcaatcttgaggggaattatttttatctttataggaaatttctaagattgtaaaaaatagtgtataatgtatgagaaataaaaaacagcataacaaagagtgcagttttttgtggtaaacttccaacaccaacatagaagtgccacactttgatagatgccatatattactcatgtaattattattccgcacccggagaggcatagggcaggcagtaaaacaaaagaccatatgattaactttatcttttaaaattgattctaccaggatttttaagattattataaggaaatagaaaataagaaaaatgtatttgacaaacatactaacggtatgtataatgaacttaccatccacatacaggagggagccatggcaagaaacaaatatccggaagagacaagaaatttaatcgttgatacggcagccagactatttatggagaaggggtatgaccacacgtctatccaggatatcatagacaatctgggaggccttacgaaaggagccatctatcaccatttcaaatccaaagaagagattgtgtacgcggtttttgaaaagttgtacgcatcggcggatgtagacatgaaaaaggtctgcgagagtaaggaattgaatggatttcagaagttacaggaagtcttcaggttatccatttttaatccggtgcagaatgatgtgtttgtagtagcaatcgatatgattaagaatccacaactgctggtcatctatctgcgtgatacggtgcagacagagtcgacagagatagtgagacgtattctcgaagaagggatagaagatgggtctataaagaccgagtaccccaaggaactggcagaggtcttgatgctgctgggaggaatatggctgaatccaatggtttatcattgcgattcagcagaaatcgtgagaaagacaagattctacaagcatatgctggaggcgcttggccttaatctgattgaggattcatggattgaacggatagaatcatatgccgtattgtatcaggagaatcaaaagtaagaaaaactgtcctgtttttgcagggcagtaaaattttaaaattatacataccaacggttggtattaaagggaggataagtcgtgattgaagtaaaaagagcaggaaaaaccactttgatgaagatggcagcaggcagcgtcgcatttcgtaagatggaagtatggattaagaatatggaggttaagtaaatggatcagaaaaagggctattcaaaagatttttacctggtcgtaatcggtcagatcatctcattgtttggaaatgcggttatgcggtttgcactgcccatccatctgctgaacgtgacgggatcagcggccgtcttaggcgtggtgtccggatgcgcgttcattcccctggcggtgatgtcaccaattggcgggatcatagcggatagagtgaacaagcggaatgtaatggtatttctagatttctttacttccgggctgaccgttctattcttgctgatgtatggaaaggtaagcataacaggaatggtgctggtgactctattcttgctgtatggaatcagcggggcatatcagccttccgtccaggcaagtattccggtattggtagagccggagcatattatgccggcgaatgctattattaatatggtatcctctttatccggcctgttggggccggcgcttggcggcacagcgtatagcctgtggggaatctatccggtgctgtccattgccgcgggctgcttcttcttatctgccgtgatggagatctttattaagattccatatgagaagaagcaaagcacagaatccatcctgcgtcagacgaaagacgatctgagcgagagtattgcctatatcggccggaaaaagccggaactagcaaaactgacgctttgctgcgcgggcgtgaacctggtcatgtctgcgctgatggtcataggcctgcctgttatcgtgatgaatatacttgacttttccaagtctgaggcatccaggctatatggatacatggaggcgattcttgcgatcggcggcctggcaggaggaatcggcgcaggcgtatttggacagaagttaaaggtaaacggaagctggaagttcctgctggcttcaggagttctgctggttcccatgggagtcgtgctgctgccttcctgcccgccgtatctggcatatggggtgcttgcggctgtagggattgtcattatggctatgtcagcaatctataccatacagattatgtcctatatccagatcacgacgccccagcacatggtggggaaagtcattgcctggattatcgcggtgtctacatgtgcccagccagtggggcaggttctatatggattcctgttcgaaaagatagggcagaatgcgtatctgattttctatgcggcagcagtatgctcgatgctgattgcgtggggaagcaggaaggcaacgaaggcattgcagaattgagagacagttactagcgaaaataagaaagagatgatgcctattgtagcgcaattgctggaccgtacggtcggcggagatgaaaggagccgaaggatcgtaaaaagacggacgggattattgcgacttcgcttatcgttgcaggatatttcctgatcatcggcgcaggctatgtgctgaatacggtgacgaactgtttcctgggtgcgttaaatgagccatatcgtggcatgtgtagcggcatcctatgcgggatacagagaaatatgcagataaattatgtcttgaatcctaaaggttgtgcaatctggccatttgtcttataatatatgcgattactagaatgaaggattggaaaaggttacgaatgatgaatagaaagataatgaaaaaggcagcaaagcgcaacctgaagaagcactattggatattcttggcggcttgcctgatcgcggcttttctgaatgtggaattctccgggactctgagttttgcgcaggtcaatgtggagccggcccaagaggcagaaggaagtccttcttccgggaacaccgcgtttaagcaggcaggcgcgtgggatgttatgaatgatatcctcagcggcaatgagaaggaaggaaagcagctgtctgagcagatcaggcaggcgcagattcagcagtccgggcaagcgaatcctgcatttggcaggagcagaggcgtgctggcccaggcggtgaactccattacatccggctctttatttgtaaccatcgcgtctgcggtcaatggaatggtgaaatcaaaagaggtggcgcttctgatcctgattggccttagcatgaccttgatgctgggtttctggttttttattaccaatgtatatacagtaatttccagaaggatatttctggagggacgtaattttgagatcgtgcctattcagcgtttccttttcttattccgcgtgcggaaatggacgaaggcggcatggaccatgctggtcaagtatatatatgagtttttgtggtcgttgacggttattggagggattatcaagcgttattcttattatatggtgccatatatcgtggcagagaacccggatatttccgcaaagaacgcaatccggctttccaggaagatgatgaatgggcataagtgggaatgctttgtatttgaactgtcatttcttggctggagtatgctgggggcggttacgatggggctgtcacaggtgctgtattccaatccatacagggtggcgtcttttacagagtactatgttacccttagaaaaatggccaaagaacggaacataccggaggcgcagcagttaaatgatatctatctctatcggcccgccggaagggaagcgctggatcttgcatatgctgatgtgatcgcggtgatggaaaagccaaagaaagagatagatgacctgaaaggcatccgcaagttctttgcggactacttgggcattctgctgttcccgagcgcaaaagagcgggagtatgaggaggatcaggcggagcggactaggatctttgccctgcaaagagcggtagaagggaagtgctatcccagccgcctggatccgattccagagatggcgaagcggcagaaggtagagacggttcattacatgcgtcattatacggtgtggtccctgatactattattctttatattttcctgtatcggatgggtatgggaggtgagccttcatctggtaaatgacggcgaatttgtcaaccgcggggtcctccatggcccatggcttccgatatatggaagcggcggcgttctgatccttaccgtactcaataagtttcgcaagaacccggcggcagaatttgtggcgatcgtcgtattgtgcggtgtagtggaatattttacttcttattatctggaagtaacccagggaaagaaatggtgggattatagcggatatttcctgaacctgaatgggcgcatctgcgcggaagggctgctggtatttggcgtgggaggcatggctattgtatatgcgctggcccctgtcctggataactttatacggagacagaagctaaaggtagtgattcctgcctgtctggtgcttctgggagcctatgttggggatgccgcatattcgtcggaacatcccaatgcagggaaagggatcacggactatcagagcagggctgtaagacttgacacgtatgccaataaatgaaaagatgcaagtgaacacttgcaaggagattgaatatgcttgacgatacccaggaaaagattattaaagcgacgatggaactggtgatggaaaaaggatattccaataccacgacgaaagacattgcccgaagggccgggatcaatgaatgtacgattttccgcaaattcaagggtaagaaagagatcatactggcagcgatggaaaagccggagtggaatccagatttaaagccagaagactttgaaggatactcgggagatatgctgggagatcttacacgtttttctgaagtttatatgcagaaggtaacgcccagaatggtaaaggtatctaccggacttcgtacgccggaattatatccgtatactgcaaaggggattttgaagattcctcagaccttcaagaaggcattaaaagaatattttgtggagatgaaggaacaaggaaagatccggcgggcagatccggaggaactggcaatgatgttcttgtccatgaattttgggttcgtattcttgaaggcatctttcggctctgaactttcaccgatagaaagtgcagcgtatatcgaaagtagcataaatacttttgtaaaagggatcctatagagaaccattattatggcactgagaggtgccatatatttttaacatgaatagttatgaggaatatatccgtcagtttgcagaacgcccgattcctaatttttataaactggtcaatgccccggtaaagattgacaagatcctggccggaggcgaggctatcgtgctggaagaaggcatgaccttaagcgcggcagaagttccgggccattcgagggggggctacggcgtattgcctggataatgggaaagaaaaagtgctttttacgggggattccattcctgcaaaaggcgatctgcctatatttacggatagcgttaagagcaaagagacgctggaaaagataaggaggatgcaaggcatagattgctattatcctgcctgggagaggtgtatgtaagagacgagatatctgatatcccggatagcgcgtttcgtataattaaagacattgagaactgttcggcaacagtgttattggaatatgcagatcgaagcatggaggagaagatgggtcggatatgcaaagaacttcggatggagcatctgtccaggaatccgctgttttataggagtgtactaggcagcctggatggggcatagataaatatatagaatatatggatcaatagcatccctatgatgaaggaaaagaaaacccgtgaaacgggttaaccttcaagggcattatacaggatatcaaggaactcgctgtttgtcggtttttctttcaacggataccgggctatctttattaggtattctctgtttccattataccagcaataagctatggcggtgcgcatacaatgttcgacattatcttgagatgtctggtatttcctggcaacttccggatatatgtacttgcagatggacgggatcttatctccgtcatcaaggcagagacatagggcatgcttaatatagtggaagccctggtaagtagaacgtatgccaagagtgagcaaagtatctttaacacgtttatccataatttcgcctcccttttgctattaataacacttaagggacggaaaatacaaaggagcggagcgaattctatgaaaacatatagaaatcgacaaagcagaagcaccctgtatgtctcaggatttttatgggaataataggaggcagcagataatggtataagggaggcagattatgaacgaatttttgacaagttatctaggcggcatcataccggtagcattcaggattcaaagtggtgaggaaagcatgatcgtaggaagggaccggcctgagtttacgatcacgcttaacgaagatctggacaagaaagaattgctgaccagtacttctctggcgcttggggaggcttatatgaaggaagaactggaagtagacagggacttatatgaagtcttgaatctgtttcttggacagatgggaaagtttaagatggataaatctgctttgaaaaaattaatccttacatcaaaagcaaaaaagaaccaagaaaaagaggtaaggttccactatgatatcggcaatgaattctaccgtctgtggctggatgaaacgatgagttattcctgtggatattttaaaaatgcagaggatacgctgtatgacgcgcaggttaataaggcggatcatattctggaaaaactgcagcttcaggaaggaatgaccttgctggatatcggatgtggatggggattccttctaatgcgggctgcaaaaaaatatgggataaagggaaccggcattacgctaagcaaagagcagtaccagaagttttcagaggacatcgaaagggaaggattgaaagaccggctgcaagtcgaactgatggattaccgggatttgaagcatagcggcgtccagtttgaccgcgtggtgagcgtagggatgctggaacatgtgggtagaggcaactatgaattattcatggagaatgcagaggcagtgttgaagccggaagggttattccttctgcattacatcagcgcacagaaggagcatgagggcgatccatggattaaaaaatatatttttcctggagggacgattcccagcctgcgtgaaattatcgatattcttccggaatatgaatttcacgtgctggatattgaaagtcttcgccgtcattataacaggaccctgctttgttggcgtgagaatttcctgaagcacagagcggagattgccagaatgcagggagaggaatttacccgcatgtgggaactttacctggcttcctgcgcggcgacatttaataatggaattattgatctgcaccagattctgacctcgaaaggaatcaacaacagactgccgatgaccagggtggtataagcataaggggggataggccgcatgcgccgtctcccctgattggttattgattttctatgaaatctgtgctaacgtatcctatattatctattctattttgccagtaagctggcgtcagcaactcttccgcggattctgcgggccaattcaatttgaatgatgatattttagaagggagcagtctatgggtaagaacgacatagcagtaaaacaatggctttctgcaaaagaccggtttgcagatttatttaacatgttgattttcggaggcagcacggtcgtgcatccgcaagacttggaagatatggagggagaggcagatatctttgttcctgacaaggcaggaggggagaatgggatgcgcctatcttttttctgctgagcaaatataatggcagggaagaaggcgtatcggaggcccttgacatcctggacaggcagatacaggaattttaccaaatatacagccggaaaaaccaagagaaagaatagtcgagagattccgtagataactctacaatgggatgaagagaattccaggatacattaaccttttcttaggaattaaacaacagaatattaaagtatgggtaactcttattcagtagaatattactgaacaagagttatttgtttataataggaaaggattggtgtataacatggaatatagaattaggaagcgctataaaaagaaaaggcggcattttataaggagggttgttattagtattgttgcagtggcggttttgattttagttggaaggaagtttactcctaatactgcaatagatctggagaacttatatagtccctattcaattttaactgatctggattcagggaacgctcttgctgaacataatgcacaagatcggatttatccggcatcgcttaccaaaattatgacagccatactggcaattgaagatacgcaggacatggaagaagttataacacttcctacggattttttctcaaaactgtatatagagaatgcttctatggctggctttcagccgggagagcaggtccgtttaaaggatttgctttacggcatgcttcttccgtctggtgcggaatgctgtctggctttttgcgagaggattgccggctccgaggaagcgtttgtgagactaatgaaccagaaggcaggggaactggggttggagaatacgcatttttgcaattcaacaggactgcatgattcggaacactactccactgtgaaagatatttctgctcttttgcagtatgctttaaaaaatgaaacctttagagctgcctttacaagcagtcaatacagtacgcttccatcggagcagcatccgaagggttttacattttacagtacgatgtttgaatgtatggaaagtacaaaatttactggaggaaaaatcataggaggaaaaacgggatatacgaaagaagcaggattatgtctggcaagcctggctgaaataaatgggaaagaagtcattttagtaactgctaatgcggatggaacgcaccagacaacaccattccatattctggatgctatgaatgtgtatcgtcagatgggggaatcgtctgtatgttatagcagtaaattttcacctaatggatatcttaggaaacaatttataatttcataatgaatattaaatataatattaatgtcaacctgatataatatgtaacatttaaatgaaaaggagaataatgccttgagcgagaagatacttgtcgttgatgatgagaaagaaattgctgatttgattgaagtatatcttcagaatgaaaatctgaatgtatacaaattctactcaggtacagaggcgcttgcccatatggagagcgtagattttgaccttgccatattagacattatgcttccggatatcagtggtctttctatttgccagattatgagggagaagggctgcgcttgtcctatcatcatgcttacggcaaaggatgaggaaaccgataaaattaccggacttatgcttggtgcagatgattatattacaaaaccctttcgcccgcttgaactggtagcgagggtaaaggcgcagcttcgccgctacaaaaaatacaacacggtctctgctgcccctgcgacagagacaattcttgaatatgccggattgactatgaatatcaagacatatgaatgcctgcttaacggagaaagcctatcgctgacacctacggaattcgcgattcttcgggttcttctggagcgcaagggcagcgtggtcagtgcggaggatttgtttcatgaaatatggcaagacgaatactataataagagcaataataccattaccgtacacattcgtcatcttcgtgaaaaaatgaaggataccggcggaaatcccaaatatatcaaaactatctggggggtgggctacaagattgaagatatttaaaaaatcagaatacaactattcaaaacttagccgtctgacatatatcaaaggagtatttattacggcgggcgctgtcctgatcatatttctcctgcggttattaagcagggggcatctggcagacagaattgccgaatggatagcgcgtcaattctcgctaagtgatttccaggctgagatggcctatttcaatcttataacccttaacatgcagtatatacttgcgacggtaatcatcatattcatgcttctgctatttcggatgctgctaaattcatataaaaaatactttgatgaagtcgtgaacgggattgaccaacttatagatgaggacggacagatatcgttatctccagaattagaagttgttgaacataaacttattcatgtaagccatacgctcaaaatacgcgatgatgagaagcagagagcggagcagcagaaggatgaccttgtagtttatctggctcacgatgtaaagacaccgcttacttctgttatgggatatctaagccttttggatgaaaacccggacatgcctgacgggaagaaatcagaatatatccatattgcatgggaaaaggctaatcggcttgaaactttgatcaatgaattttttgaaattatacgtaataattcggaatctgctccccttcaaaagacaaaaatcgacctgtattatatgatggtacagattgcagatgaactgtatccgcaattgaattcatgtggaaaacgcattgagaataatattagcgagacggtcgtgttgtacggaaaccctgataaattggcgagagtatttaataacattttgaaaaatgccatagcttacagtgtggatcacagtgttataacgatatcggcccaggaacgacctggaaaaactgtgattaaatttgaaaatgaaggagatattccgaaagacaagctccaagtgattttcgataaattctatcgcttggacagttcgagactaagtgcgaccggtggttctggacttggccttgctatcgcaaaagacatagtgatacgacatggtggcgacattaaggctgaaagcagtaatggagttacggtgtttagcattgaactcccatcaatcccatgcaaagtttccgacgagatgtgttaacaattcttaggattttatttatcattctttaaacaatcatttatttcaatttaaaaaattgcctgttctttcatggtattctgaatcaacctgaaagagcaggcaatttttatgaaaggatggagacaaattatgaaacagttatatcgaagttttacaatcctatgtctgatagccgtgattttttctatgacgggatgcagtcataataccaaagatgatgaaacgggggaatcctatgtcgcaaggttttttgatatccctgatgaggtgaatgggatttcaaggctcttagcaagtgacgagactgcctatatgtgctgctcagaaaatgatgaggtttcgtacatagcatccatatcaatggatggcagtgactttcaaaaactgccgttacaaacggaggattcgatagaattcctggattttggtatagatcaacagggctgcatatggaccgtctgccgggatcatgccggaggttacagtctgaaaaaatttgacagcagctacacggtagttcaatctgttgacttgacttcggtattggacgatgcagtgctctcatctgttgacaaggatctatctataagtatagatgcaaaggggaacatctgcttagcagccaaatgtggaagtacctatgcgtatctttttgacagcagcggacagtttttatttcctctcaattatggcgggaatcttatgactacaataacgactgccgaaggaaagatcggagtatgcgctacgacttcggatcgaatgaactacgatctgcttactgtggatatggataataagaattggcataaagatattatttatctgggtgcagtgacgggaatttatggaggtcatactagcaatttttaccgttttgactcttcaagcctgtatggatacaactctggggagcaggaaggcagacgtatctttggctggtccgatatgggactaaatacagcagatgttcacttatgtgaacttgaggacggacgatttgtggttcttgccgcatcctccaaccaggcctccgtgctctcatatgagatggctgtccttacgaagggcagcgataaacggactgttctcagcatgactagcctgacggcgaatccgagtgttgtccagacggtttcagattttaataagacaaataaagagtataagatcgaactgacggagtattttccgtatgaacaaaacgtatccgatgaggactggaataatgccataacgaatcttaacacacagattatatctggagacataccagacattctggatatgagcgatttatctgtccagatctaccataacaagggattgctggaagacctttatacatacatggagaaagatccggaaattaacagggatgattattttggaaatgtatttgatgctataggtattgatggcaaactgccatacatcacaaatggcgtggccgtatccacaatgctgtctgacgcaagtgcacttggcgatactgctgaatggacactgaaagacttggaggatgttcttgaaacctctggaacgaacgccataagtaatctgtcaagtgaagcatttctcaaaataatgctgcagaccagcgacagtcttgttgactggagtttgggcgagtgctttttcgattcttcagagtttatcgaattgctggaatttgccgggaaaatccaggataacatcgctggaaataatacggacatgagtgcgggtctggcttcttatgaaacgatcaacagcgtatatcaaattgcacgatacagagatttatataaagggaacctgaacttgctcggtcttccaagtgacagtggcgaatatcacgcggtcaagccggaagtaaagatcggaatatcttcatctggcaatcataaggatggcgcatgggagtttgtcaaaatgtttttgatggaggaacatcaggaatcttgttatatgcttccaatccacaagggggcatttgatacagtcatgcaggccgccattgatgggaattctatgtggactctggtatacgagaacttaaaggcagcgcaggaggatgcagagactgtgaagggactgataagcggtgcttcttatgtggtgaacgataatctgactttggaaaatatcgtattagaagaagcagcccaatattttgctgggacaatgagcgcacaggaagccgctgaaaagattcaaagccgggcaacgctttatataaaggagcaaatgtaatctaataataagaaaggaattatgatttatgaaaaaatgtattgtcagcctgtatgtaatcatctgcttagggatattcttatttgccgggtgtgcaagtgcagatacgaacgataagacgaataaggagaaaaaggccccagccggggaagacgcatttgccaatgcaaatgatatgttcaaatctgctgatctttgcggtacagttaatggctgttcggatacgggatgtaccatagctccattgcccttttcttcaattgaggacgatgggacatcgtcttctgaaggtgtaggaagtaatgacattatttatacggatgaaaccatatttcaaaaagcaagagtcgattctgatggaaacacctattctataagcgatggtgggaaaaatgaactgaaagatggtgatattatattgtgtttcgggcatctgcaggcagatgatgcttacttggcagaaaaaattattatgatcgaattcaattatgattaattatacaggagatgagacaccaatgcttgtacatatcaaggaaaagatcaaggatattgtcacagatgataagcgtaagccttttattagcaaccgcgtacaacgtatagccatacgtctaatatcctcattctttacattaattcttttattcacaattgtttcccgtgtttccggctctgctgccgttgcaagcgttcaggtatcaacaatgacaagtggggaattgactgctcaagccgaaattgatggaacaattgatgcggaagatggcatatcaatcgtcttgccagagggcctcaaggtaatcgcagtcaatgcagagaaagggaaaaaagtaaacgaaggagaggcattgcttgaatttgataaggaagccattgaacgcgaacgggagaaactagaggacgagatttatattctgaaccagagaatcagcctttcggggacaggaagcagcgacagtgttcttgaagcacagcaggccttagaagatgcgcaggaggcgtataaccgtttgaccgctaattccgggcggaatgattgcgcagatcttgaggcggcgcttacgagcgcaaaaaataaccgagacagggtacttacaactacaaaacaggcttttgttaaagaagcggaagacaatctaaaaagtgtaaaagaatccgcggaaaatgatatccgcctagcgcagcaggcgctctccaaagcagagtatgggactcctgcctatgacagcgcactccagaatcttgagaaccaaaagaagtactgggagaatgcaattacggaggcagaagaaaaactgaaggcggaaaagagccggaccgatttttcgaatgaggcagcagtcatggaggcacaggctgcgattgacgatgcaaagaacgccttggaaagtgcaaagagggagtctgaatattccagagaagatgaactctatgctgcagaaaaggacattgaagcggcacggcgggcattgaaaaaggctcaggaacaggcgtccgtatcacagacagaaactgagattgagatccttacatacaagtctgagttgtcagataaggaaaaaatacgtgatacactgcaggatatcctggatcatgacggccatgtgacagctccggcttccggcatcgtattgaaaaccttggaaaaggattcaaaaacggaagaagatgttgacgcggttacgatttcccgtaagggggagggctttgtatgtaagggcagccttgaagaagaaagcgccgagaacttctctgtgggcgatacgggagaacttagttatagactggatggcagaacacaaaagctaaatgctcagatcacctcgattagcgcgcccgataagaacaaaaaggttctggtaacagtcgcgctgcccgatgggacctatacgcccggcatgtccgcgcagttttccctgagcaaaaaaagcgagacatatcaaaactgcctgccgctgaccgcgcttagaagcagctctgacggcgattacatccttgtactccggaaacaaagcactgtaatgggaacagagtggattgccgcgcgggttgacatcattgtcagagacagggacagccagatgatgaacattgaaagcacggaagatgcgctgaattattcggatcaggtggtcacaggttccaacaaggctatttcggaaggagacagagtgcgtattgaagactaacaattctatacactgccgggttctggcagtaacagcaatactgactgctttcgtctggtgcatggcttgttcattctacagtacgaccatggactcttgcgccagcatcagtgtccgatggaaaaatggaggcgtcagtccgtctgctctagtcagacagcaaaataatgccaagaaggacggtatagcagatcagccggaggtcacattatggcaggtatactccgcacaacagatcatggattcggatatgcgcaatacaacagcaaatgtggtggctgtttttggggagtgtgaggatatcacgacaaaatctatgctctatggcgctttcccctcaaactctgatacacaaggatgtgctgtaagttctgggctggcattttccctttggggaagcacgcaagtgctcggcgtccaagttaggattgaaggagaagtattctatgtgcgtggtgtatttgaagatgataatgcaagggtatttcggcaggccgagttcgacaaaaccctgtccaatatgcagctgacatttcctggcggcggaacacgggaggatgcggagcgttatcttactgctgcaaacttcatgggaggtacaattctggacttgcctctgatgggaaggggatttcgtattctttttagatttcctgctatcgttttagcatttggcattattgtaaggctgttaaggcgcgcaagaaaactctggcattaccaagcgtggctgttttcctatctgccgtttgtccttgctgtcttggctgtacttatgctctgtattgatttaccagagatcccttccagtttcatcccttccaagtggtctgattttgaattctggaaagatctgtttcttagtcattggaagaatgttacgagatggacgtcggcagcgccaaccttcagagataaagaactttggggctcggcatcagccatgctgctgctttctatattcgcaacgatccttgtagcagtatcggcagcgatgacttctatacgttcctataagaatatggtcctgacctgtgcggcatacatactgacgctttgcttgatatccctgggtacggcgtcatccggcaaactatcattctgcaaagagatgtaccttgtgccttgtctgtggatcggtatagattacatgctctattggcaaggaagaagatttgacttggcatcccatgaaaggaggctttctgatgataaaaatacttctaaggcaacggaagaaacagtggaacaaacatgattataaggctccatggaaagaacgtatcgtgccgtggctgtttctggctcccagcctgtttgttgtgagcgtaatggtactgctctcgctcttggatgcgtttcgccgatcctttttcctcgctgtcagcagtcgattcgttggactacaaaattatatttccgttctgggcaacagcgcgtttaagctggcagcgggtaataccgcgaaatttatagcggtttgcatgccgctgctgcttgtgatctccctgtcagttgccctgatgctgactgcctttcaggaaaaacatggcattttcaaaacctcttttctggtacccatggcaattcctgtggcctcaattgttctcctgtggcgcgtcatattccatagaaacgggctgctcaacgggatactggcgctttgggacgctgctccggttgattggattggcagcgccgcttcttttggagtactggtattcgcatatctctggaaaaatttcgggtatgacatggtgctgtggctctcaggcatcagcgccattaatcctgcattgtatgaggcggcgcagatagacggcgcggggagtatcaagcggtttgtaaagatcacgttaccaaacctcatgccaactctgttcacggttaccgtgctgtctctgctcaattcattcaaagtgttcagggaagcctatctcatcgctggcagctatcctgatgacagcatttatatgcttcagcatctgtttaacaattggttcagcaacctggatgtggataaaatgtgcgcaggcgctgtgatgatggcatcgctggtattcattctaattatgatattacagaagattttgaatcgaggtggcagcgtatgaaaaaatggttcatcggactcgtccttctttttatagctgtttttatatgggtgccgctgtggatgctcttatccggcactcttatgggagccggagaattgtcttcgaatcttgctccggttctggaaagcgatgacggcttcgctacgtggcccatcattgcaaattacccgactttgcaggcatatgtggaactgctgctggatacgcctcaattcttcacggtattctggaattcctgtaaacaggtttttccgatcatactcggtcatatagttttaggcgcccctgcagcgtgggcatttgcacgttttgaattccgtgggaaaaaagtgctgtacaccttatatattgtccttatgctgatgccctttcaggtaactatggtttccagttatctggtgctgaataaactggggtttattgataccatatgggcaattatcctgcccggcgcagcctctactcttccggtgtttattatgacgcgcttttttctgtcgatacctagtgccgtaacggaagcagcggctgtggatggggcgtcacccattcagacgtttttgagacttgggctgcctctcggggctccgggaatcctctcagttgtcgtgttgggctttctggaatactggaacgcgatggaagcgccgcaggcattcctgaaagaccagaccctttggccgctatcgctctatatggcgaacattacagctgacaatgccggagtatccctgatcgcgtccctgataacacttatgccgcctctcctgatctttctgtttgggcagagataccttgagcaaggcattatatcttctggaatgaaggattaaaatacaggactgatatattgaaggagctgattatggaaaatagatttcaggcaagtggcctacaaatacacaacgtaaataaatggtatcccggagacgttcacgctgtcattgatatgaatatggagatcgaacagggcgaatttattgttttcgttggcccctccggctgtggcaagactacactgcttcgcatgattgcagggcttgagggcatcagcagcggcgaggtcattatggatggaagggtcgttaacagagtgccgcccaagaaacgagatatagcgatggtatttcagaactatgccctttatccgaacatgaaggtaaaggataatattgcgttcccccttaagatgcgccataccgggaggcaggaaacagcgtcgaaggtagcagaggttgcagaaaaactggaattgaatacgctgcttaacaggaagccgggcgccctttccggcggtcagcggcagcgcgtagcccttgcacggtcaatggtgagagagccgaagctttttctcatggatgagccgctggctaacctggatgcaaaactccgtgttgagatgcgccgggagattataacgctccagcgggaattaggggtaacaacaatatatgtcacgcatgaccagatcgaagccatgaccatgggaacgcgtattgctgtcatgaacggcggtgttctgcagcagtttggaacgccccaggagatctatcagcatcctgccaatatgtttgttgccggatttataggctctcccaatatgaatttatggaatacagagcttgtttccgagaatggacgtaattttctgaccctggggaaagcccgtattcctgcaggcaaagacagttatcctgtggatcaattgcaagagccgctcaagggtgggattcgtcctgaacacattgaacttgttgcgccggatacatgcggcgcaatccggatgaccatcagcatgctggagaatacggggcgtgagacagcgattttccttacagcgcccggcatgccggatcttgccattgtgacggatgctgatttctcggggcagcccggacaggtggcgtacattcacctgaggccggaaaaaatacatatatttaatgccaagtcacacgccatcactcatgaaaagtgattggcgccattatcattttttcaaccagaacgaaatcatcctcttttttgctgctccagtattttaatattgacaatagtgtgcgccgcacagtataatgaaaacacaaggaggagactctatgggagaagaaaaagatttgatgcacaacctgatatcggaactgcgcagaggaaccttgatattaagcgtattaagccagctgagcgaggctaagtacgggtatgcccttgtgcagagcctggaggaaaagggcgtggagatagatcccaataccttgtatccgctgcttcgcaggctggagaagcagggaatactaacgagccagtgggatgtgggcgagtcaaagccgagaaagtactacagcaggactcctatgggagacgacatattccggcgcttaaaagaacagtgggaacagttgtcagaaaatatggagcagatattgagggaggaagagatatgacagacagggagaaggaattagtcaaccgctatgtctatgaggtgacaaagaggatcccgaaagaacaaagaagcgagattgaaatggaacttcgggaactgatcgaagatatggcagaaggggcgccgcttgaggaagtgttcgcaaaacttggggatccggcagtatttgccaggaagtacagggaagataagaattatgtcatcagcccggaatactacgataactatgtctgggtgatgaagatcgcggttgcctgcatatgggcagggctgcttatcgccatggcggtgaaatgctttattgactatcaggatatcatccggatagccggcgagtttatcagtgacgcagtcatggcatcgttagcaatagttggaaccgttaccttgatctttgcattcctggagagacagaagatcaaagtggatttgaagcaggaaaagccgtggtcgccggatatgctaagcccgattccgaataagaagtccaggatcagcagaggagactgtatcgcgtccctgatatttcttgcgctgtttagctgcctgcttatttttgcgccgcaattgatcggagcatattcggtaaacggaagggatgtctcatacgtgcctgtctttaacctgggatggtgggatgtgatattgccggtacttcttcttgcgatggcggtgggattcttcaatgagatcatccgcctgatttacggatgctactgcaagatggttttgctaagcagtatcgtgaccaattgcataggtatcgttcttgcatttatcgtgctgaagttcctgccattctggaatgctaatttcgcgcaggaggttgcgacacagcttgatgatacatttaaattcaaagtattctggcagaataagatgattctggggtgggatggagacttcctgtcgaatgtcctgttggcaatcattgtgatcgcttccgtaggcgagatcatcacgactgcgtataagacggccagatatggaacagacagatagaaaagaagacacgcctccaggatgcaattcgcttcctagggatgtgtcttttgttttagaatgctttcaaggaattactgtgcctttgcagctttttcctttttcacgatgcggcttaagataaaggtaatgatagcacagagtactgcggcaaccattgcataagcccatgtcatattgtatccggtcctgccataattatccatccagctgccgactaatgtatacataaagatgtcaggcgtgtagcctaagcaggatgcaataccagatacacggccgctcatgttgagcgggatgcctgcatcgtcatgcactgcgaagtactggcttcttacggcgtagataaagaacaggccgacgaagaagtttgctactaccataacgcagaggctggcctttgccggtacgacgataaagagggcgaaggataaagccagaccgatacatccgccgatgataactttaaagcgagatttcatcttatctgccaggaaaccgccgacaataccgccagcaccctggatgaggtaacggataccgccgagcgtagcagctgatgcagctgataatccatagaatttctgtgcaaatgtggttgcatatgcaatcagtccgtatacgctgtaagcagtgaagacgattgctacaagcagccatactctcgggatcagaagagccttgaacataccttttgtaacgtctataaaggattcggaattctcttccttctttgtgtcttcaataaagataaagttaaggataccaatgataataactacgatagagcatactttgatagccgcggatgctccggcaacttcatctgcaaagtgagtaaatgcagccgtcatgccgaatacaagcagggcattcatgatacctctgagtccttcctgcagtccgaacagacgtccctgctcctcttctgtaccaagcatacgcgttgccttgatacaagcggaccagtaggtgataatggtagagatacccataagtacgaagataacacggcttatggtatagccagggaatgtggagaaccaaagtcccaggacacccgttgcgataaaggagaaagtaagcaactttctcgctgaaaacttatcggctataataccacctataaaataagagaaaagtgacattgtcgcataaccggatgataatagtcccatctgcgcgttagacaggttcattgcattctgaatcggtacatagaaggtttctcttatgtacggcaactgaaagatgattccggcaccagttgctagaagaagcagagtgccatacttcttaataaaagctttgttcatgatttcgcctccagattaactataataatttagtggtgatatggcgctgcagtcgccctatctgttatgaatgtaacaaaaaaagagaaaagtaatgccttgacagcgttacttctctcctcactctttgtaactaacacgaatgataaaatatttgtgaaaaaaagtcaatcaaaaaactggtaaaaatcgaaatataatcattctgcacaaaaacgatgctccaataatatgaaaaataaccaattgactttttgcgcaaaatggttttatactatatgcagttaccgaaagagattttcagagaaaagtaaccagcgtggcaggagttccctgctcgtgttgtgttacttttctttttttattcccatttatctcctacggtgaagaagtaaagaaaaatgcgttataatgaaatgaaaggagcccagagtcatggcaattatttcaagagaacaaatcgtagaaggattagttgatatccttggaaaagatcaggtcgtaacagacgagcaggtattaaaagaaagcagtatcgacagatacagaaaatatgagcaggtatgcgaagtatatacgcagcctatcccggcagcagtggtatatgttaggagcgccgaggaagtatcagaagtgctgaaattcgctaatgataatgaaattaacatagtgccaaggacagggcactccgcgatcgagggcggactcgagacagcccttaaggattctgtcgtaatcgacggctctactatgaataaagtaatcaaggtagatgagtacaacatgcaggttacctgccagtgcggcgtgccgcttcaggaactggatgacatgcttagagaaagaggacttacgacgggacattccccacagtccaagccgcttgcacagatgggcgggctggttgcgacaagaagtatcggtcagttctctaccctgtatggcggtatcgaagatatgatcgtaggattggaagcagtatttccgaacggcaagatctgcagaatcaagaatgtaccaaggcgtgcggcaggaccggacatcagacacatcatctgtggcaacgagggagcgctctgctttattacagaagttacattaaaactcttcaaatggcagccggagaacaaccgttatatcggatacaagctggatgacgagcatatgaaacttggatttgactgcctgcgcgaggttatggtagcaggatataagccatctttcgcaagactttatgatgcggcagatgcgcagcagcacttcagttcctggctggaagaaggcaaggcaatcctgatctggatggcagagggcccggcaaatatcactcctgcgatcgaggaaggcatcaaggatctgatgtccaagcatccggaactggaagaagtagacccgaagctgatcgagaaatggtatggcggactgaactggggaccagagcagattgcggaagagaaggaagaaatcaaggctacccagaacatcggcattacgacagaggtatccggaagctgggataatatttatgaaatctacaagactgcatgtgacagaatcatggaagaagtaccggatatgacgttgatgggagggcactcttctcacagttatatcaatggaacgaacatgtatttcgtatactattacaatatcgtagactgcgctccggaagaggagatcaacaaatatcacgacagaattaaccagattatctgcgaacaggttatcaaatacggcggatccatcgttcatcatcatggacttggaaaggcaagagcaagatatgtaacagaggagtatggatcttcctactatatgctgaagactctgaagcaggcattcgatccaaacggcgttatgaacatgggaacattgattccgctgcgtaaataatccatgaagatcttagggtgtttcaagatagttccggatctggattttattgcacaagaggactggatggcagatggacagcttcaggtagacactagttacgcaaaactgctgtggaactgttttgatgaaggagcactggaaatgatgttaaggctttctgatttatcagaaggctttgatgtcgtatatgagcttaatgcgctgacggtcggcaggctccgtcatgaaacctttttaaagaccttgtatgcgcttggatttagccatgctgtcagggtagaggcagaagaggatgtggacttaagattctgcccgggcctgattgcagatgtaacagcaaaatatgtaaaagagacggcttcttcggacgtgatcgttatggggacacagagttcggatggcagcaacatgaagacgccgctgcttcttgcggagaggcttgggtggacatgcatcacgcaggtgacagcgatggagccggtagatgaaaagcatctgaaggtaaccagccaggaagacggaaagacagcggtacaggttgtgacggttcccatcgtgctggcggtaggaaatgcgccttgcgcctatttaagggttcctacgctgaaagacaagatgaaactggggaaaagaccaatcgaacatatcagccttcatgaagaactggcagaaagccagagccggaatgtagaacttaaggggctgacaccgatagatgacagcagggataccatactgatagaaggagagtcgccgcaggagaaggcagagaaactgtacgagatgtatttgaaagggaggcttgaaagactatgaaatatcattatattataaatgcctattctgatgatgccatctgccagatggaagaattccatgcgttccaggatgccttcctgaaagattctgaacagggcgaggtctatattctttgcagaggcaatgaagatatagaactgcttgcaaggcatatcgctgaaaacgcggttgtggtggctgcgccggactattccccggaggctgtgctggaggtccttgaacaggaggcggattccgaagaactttatattttcgggagcggttatagcggcatcgaactttctgtaagactgtccgaaaggcttgggggaagttccgtaacgtccgtccatgctctggaggcgggggaacccgtgacggtaaggaagatggtctatgcaaaccatatggaaggcacgttcgcgatgaagaaaggaccttactgtatctcgcttgcgaaaggaatgcagcgtaaggaggcacaggagggcatattccatattgagagggaacttcgctgcagaaaaggaaacgattttgtggtttccagggagaccatgaaagaagagacggccggaggcctgagcgatgcaaagatcgtggttgcggccggaagaggcattcagaataaagaaaatgcaaggttccttgaggaagcggcaaaagcctttggcggagaacttggggcaagccgtccggtggcgatgaatgcttggacgcctatgagcaggctgattggcgtgtccgggaaaatgatcgcgccggaggtctgcattacagcgggcgtatccggggccgcggcgttttatgcaggaattgaaaagagcaagttaatcgtagcaattaatacggacgagcaggcgccgatcatgaagaaggcagatgtggcaatcgtggatgacttcatgccggtaatccaatctctgcgcaagattgtaaaagagcaataaggatacgctggggtaagaataaatgacgggggatgggcatatgagacaattgatttatacgatgaaagaacaatatgaagagtttttaatagacgagtcaaaattctccggatatgcggacagcatttctttcccggagagccaagaagagatgcaggaagtgcttctggaactgaaaaaaggacgggtacccgtgactatccagggaggaaagactggaattaccggagcaggcgttcccaaaggcggacatgtcatgaacctgtcccatatgaataaagttaaggacagcgtcctgctggaggacgggaccgggctgatcaccgtggagcccggcattaacctgatcgatctcgggaaagagattgccgcgcggttcaggaagacccccttattctggcctccggatcctaccgagagttcagccacggcaggcggtattgcggcgacgaatgcccaaggcatctgccggcttctatatggaccaagcagagattatttcgcgtctttaaaacttttgaatagcgatggagagattatggcgatagaaaaagggcagaaactgacccttgcgtcaggcagggaaatcgacaggatggatgcggtgctgggaaaggaaggaatcaccggggcaatctgcgaactgacgctgagactgattccgaagccgcagagccagtgggggattgcgtttttctttggcagcagcgaggatgcagggaggtttgtcgatattctaaggctcgacatgccggaatgcgaacatgcgaaggtagccgcggtagaatacattgatcggatggcgatggacctgatcgaggagcataaaactacgatgacgaagatcaaggaactgccggatatcggggaagagaccaaaggcatggtctatatagaactgcacggagacgaagaggaaatagagatccttgccgagtccttgatggaatcggcgatggtatgcaatagcaacccggaagaggcgtgggccgtatccggcgagacggatgtggaaaaaatgcatgcattccgccatggagccgcagagacctccaatctatatatcgagaaagtgcggcagatggatgagcggattaccaagctgggaacagacatggcgatatccggcacgccattttcagagattctttcttatgtagaaaaggaacttcacgatgccggattaaaaggcagcgtatttggccatgctatggaaaatcatctgcatataaatatactgcctgagaattacgaggaatatgaggcgggaatccggctgatacgccaatgggcatcgcaagtgagagaacatcaggggaaagtggtcagcgaacacggaatcggcaagctgaagctggagatactggacggattcgtgccggagcgctatatagggctttgcaaagaattaaaagagcagctggataaagacagcctttggaacaatggaaatatatttaaagaagaggaggctgccatatgaagatcgcagtatgcatgaagcaggtgccagctgcctccgaagggaatatggatcctgagacaggcgtgcttatccgggcagggcttcaggcaattgtaaatgtatatgatctggcggccttagaggccgcccttaaaataaaggaaacatacggtgcagaagtccatgtattcacgatgggaccgcagaaggcagaaagcgtgcttcgggaagcatttgccatgggggcggatgaaggtttccttatctgcgataaggcctttgcgggcgccgacgtgcttgccacatcctatacgctgatgcaggcaattaagtcagcgggagattatgatctgatcctgtgcggcaaacagacgaccgacggtgataccgcccaggtaagcggcgcgctggcaaggtggatgggtatgccgcaagcaagttgggtgaccgaaattgtaaaagtccttcaaaatgcagttgatgtaagatataatatggataatcggacgctatcggcgcgggttgcattgccctgcctgctgtctgttgagaaggattccttcgtgccaaggatgccctcgctcaaacttaagatcagcggaagaaagaaagagatccgtctgctggggatccatgactttatagatcaggaagaagagcattatggcctaaaaggatcagccacaagagtgaagaagatatttccgcccaagcgtacgaagcggcaggatgtagcggtattggaaagaaaagaggcggcggaatatattctgaatatcttagaggtggacaggcaggaggaacagatatgagacaggcaaacatagaggaatggtctaagatcctggtatatatcgagtgcaggaaagggaagatacatccggtagggcgcgagttgatcgcagaggcgtcaaggcttgcaaaaaggcttgatatgccggtctatgcggcagcgataggcagtgagctggagaagatagaggggcagttaagcggctgcccgcttgagagactctatctatacgaagcggcggacgagtatagcccgcttgcatatgagaagatcctggcggattgtatcaaggagattaagccttccatcgtcctgatcggtggaacttctgaaggaagggcgctggcgcccaggcttgcagttgtctttgagactggcttgacggcggactgtacatcccttgagattgatgaggagggcaatctggtgcagatcaggcctgcgtttggcggaaatgtgatggccagcattgtgacacgctttacaaggcctcagtttgccacagtaaggcctggggtgatggagccggcgttcatagaaggacagccggccccgaagatcataagagattcgattgatgctgctgaggatgcatttcaggtcctgagtgtaaaagaggcgaatgttacggagagcattgcggacgcgcgcattcttgtcgtggcaggaagaggcgtcaggaagaaagaggacctgtcaatgcttgaagaactggcgggccttcttggaggaagacttgcctcaagcagagccctggtggagaagggatggatgcctgcgaagtgccagatcggcctgtcaggcaatacggtgagcccgcaatatatcattacctgcggggtgtcgggaaccgtacagtttatggctggcatgaagcatgccaagaatatcatcgcgatcaatagggatccggatgcgcggatattcgagattgcccattatcctgtacttggcgacctgtatgagatcgtaccggagatgatcggacgattgaaggcaaagaaaggcgatgatattgctgaaacttagatatcaattaacaaaagatgagatagaggaagccttgctggatctgaactggagaaaggaaggcattttccgcagtataaacctatgggctatgagcctgattggcgtccttttgctggtcggatatacgagaaatcccggtcagttctttctgttcctgctcttgctgcttgatatactgctgcttctatatatggcatatgggactgcatacctaagaaaaagaagggccgggaagatcgcggcgcaggagggggaataccggattgagatcacggagtcatacatcgtgatcgcagatgcgtctaaaaagacagagttatccggcagaaaacttcagtttctttgctccgagcatgtattggtcattcggatggacagagaagttgttacgattccccggcggatattgacgaaagacgagtatgaggcgataagaagagttgctgggctatacaaaagtaaatttataaatataatgacggaaaaggagtaacaatatggaaacagaagtacaagagaagaccgtgaaactatcgttgaggaagggagtattctttccgccctggcttttgctggtggcaatggtcgtagtgagccttacgaacggcgaagcttttatggcaggccttaatacggtgacaaattggatactggggaactttgcgtgggcattcaacttgacgacgctggcctgcgtgatcaccgttatcatggtatacttttccccgcttggaaaggtgcgaatcggaggaagcaaggcaaggccaatgatgcggttcatcgatctggtgtggatcacgctatgcacgacgattgcggcaggcatactcttctgggcatgcgcagagccgctgtatcatatgtatgcgcctgcggcagtagaaggagtcgaggcaggaacagccggttccgctctgttcgctatgaagacgatgtttctggaatggacctggtctccgtatgcgatctatacagtagcgaccctgattttcgcgttcgtattctacaatatgaaccagtcctattccatgggatctgcgctggtgccggtctttggagaaaaggtaaagaaatacaacggagtcgtggatgtcatctgcctgtttgcccttgtagccggaatggccgcatcgcttggaaccggcacgatgacgattggcggcggcattgagaaggtatttggcatcaaaagtgaccctgcggcgtggggcgtgattatcgccgttatcgtgactaccttcatcatatcaagtatctcaggtatcatgaaaggcatccggcttctgtcgtctatcaatgccaaggtatatatggtccttctgctgttcctgttcgtattcgggccaacggcattcatgctgaacttttccgtggaatcatggggcgcttatattcaggactttttcaaactgagcctgatgacgggagatgtattccaggatagctgggcaaagaactggccaatcttctactggtgcaactggctggcatggacgccgataaccgctgtcttcttaggaaagatcctgagaggctatacgatcaaggacgcgattaagtgtaactttgtcattcctgcaattttcagcaccatctggatgggactttttgcgacggcttccatttattatgaattgaatggcgcaggaatgtatgatatattgacgaataaaggaacagaagcagttgtatatgccgtatttgaccagttgcctctggccatgattgtgatcccgttctatctgtttatcgtgttcatatcatttgtcacagcatccgactctaacacgaatgccatggcaggattgtgcacgagcggcattacgcaggatgagcaggagtctccggcatggcttaagatcgtatggggcatctccatcgcgcttatgacgtggctgctgatcagtttcgcgggaatcgacggaatcaaggcagcatcgaaccttggcggcttcccgaatatgttcctgatcatcattatgatcattggattatggaaactaagccataatccgaagaagtatgatgtacacaaagaagattacgacagcagcgggcggccgattgaatcgccaaggctgccggttgaaaaggagtaagacgatatgtctttgacaaaagaatactttatggaagcaacagaagcctgcccggtcatcccagccatcaagaatgacgaatggctggaaggctgcaaagagtcggagtgcgggattgtctatattatttacggagatatctgtacggttgcagatatcgtggataaagtgaaggaaatgggcaagaaggcaatcgtacatgtggatctgattttaggcttgtcgtctaaagagatcagtgtggactttattaagaagtatacgaaggcagacggcatcataagcatgaagccggcgctgatcaagcgtgccaacgagttgggcatgttcacgatacagcggttctatatgatggacgcgcttacctatgcgaatatcgtcaagcatgtcaaaaactgtaacccggatgtggtcgagttcctgccggcgggattgcccaaagtcatacaatatctactggaagagattgacaagccggtggtagcaagcgggctgattctggataaggatgatgtcatgggggccttaaaggctggcgcatttgcagtatcgaccaccaaccgggaaatgtgggactgttaggaagaaggagaatgaaatgaaagcagacattgaatgtcatggatgctgtgtccggaaggcagaaggacttctagaacaatatcaggtgccggatgaaaagaaggcacaggtgatggaagcggttgaaaagacggtgagagaggccaaagcagaggaatcagccccggagatgatggctaaagtcatgaggatactggaagcaggagtaggtattactgatgcatgtgatatcccgaagaaaagatataatgaacttcttttgagcaaagaagatggaatatgccaggagatccggcaggagaaggatcctttcttttctgccctgcagtatgccattacagggaattatattgattttggagcaatgtcggatgtcaatgaggagaaattaaacgaactgctggcagatcgccacagcgttacccttgatgccggggagactgccttgcttagaaaggaattggcttgcgcgaagaaactggtgtatattacagacaatgcgggggagatcgtgctggataaagtctttatccgcgtgattgaggaaatatttccggaactggacattacggtgctggtacgcggcgtaccgactctgaatgatgcgacggtggaggatgccgaatttgccgggctggatcagttggcccgcattctgccaaatggcacggatatcccgggaacgcctcttgaggatatcagccaggaggctttaaaagcaatcgatgaggcagatctttgcattgccaaaggacagggaaattttgagactttacggggatgcggcaggaacatatattatctgttcctgtgtaaatgccagcttttcgtgaagaagttccaggttgagcgcttcaccccggtacttagcaatgaaacaagaattgtgcaatatgcataaaagccatccttcccttttaacaacaatcacgatattgacaaatgaattaactagacttaaaatagatgtagttactaaaagagcggaagagagagtaacttttacccacggcaagtgggtggaagttgctctctttttgtttcagagtttctattgtgcgcaggtagaatccggaaggctctttttaataataatgtcaagagtatatggaggtacaaaaaatgagtttgaatatgaatgatttttctatggatttcttttcactgaagggtaagaatgcaatcgtaacaggcggaaacagcggactgggacaggcattcgcactggcgcttgcaaaagcaggagcaaacatcttcgcatttgcatttgtagatgatgacggaacaaccaagaaactgatcgaagactgcggcgtaaaatacacattcatgcagggggacctaacagaagacggaatgtgcgacaaagtagcagagaagtgcgtagagacctacggaagcattgacatcttagtaaactgcgcaggcatctgtaagatcgcagacgtacttgactttggcagggcagagtgggatccgatgattgccatcaacctgacaggcgcattcgacttaagccatgcagttgctaaatacatgatccctcagaagagcggaaagatcatcaacatctgctccctgttctccttccttggcggacttggatcacctgcatacgcagccatgaaggcaggacttatgggtcttaccaaggcttatgctgacgaacttggaaaatatggcatctctgtaaacggaatcgctcctggatatttccagacagcaatgacatccggtacaggaagcgccaacgatgagaaatataacaagatcaaagatcatattccggctgaccgctggggcgagagacaggatcttatgggcgcgaccgtattccttgcaagccatgcttccgactatgtaaacggaaccgtgctggtagttgacggcggataccttgtaagataattatttgaatcaaataacacgaagaaagaggtttggatcatgaatgagaaatatattatcggaatcgatgaaggatcccaaagtgcaaaaattcttatatttgacacaaagggaaatattgtatgcgaggcaaagcacgcattaaagccatataaccttccgaggccgggcatcgtggagcatccagatgacgactggtgggatgcgatctgcgaggcaggaaaaaaatgtatggcgaagttcgaagggaataaagaagacattgtaggaatcggactgtgcacgatccgttactgccgtgcctatctgaaagccgatggcacgctggcccagccggcgctcagctggatggacatccgcgtggcgcacccttacgagcataccaacccagatgtaaaatacatcgtggcatcctccggctatattactcatcgcctgaccggcgagaagaaggacacggttgcgaactatgaaggcgtatggccaatcgacgtggacaactggggctggtcagaagatccggccgtatacgaggcaaccggcatgccaagagagatgatctttgacctggtaatgccgggagatatccttggatatgtcacggaggaagcggcagaagccaccggcttcccacagggacttccggttgtggcaacatcaaatgacaaggctgtagaagggctgggaaccggatgcatgggcgatacaacggcatgtatctctcttggaacctatacggcagccatgatggagggaaaagagaacttaaaggatacaaaatgcgtatggccgaagttctcctgcgttccgaacaaatacctctatgacagcaacggaatccgccgtggaatgtggaccatcagctggttcagggatatccttggggacagctacatcaaggcggccaaggagaaaggcttatctgcggaagaactgctaagcgaagaagcagagcaagtaccagcaggttctgacggcctgatgacggtgcttgactggctggcaccagtggacgccttatataagaagggcgtaatgatcggctttgacggaagacatacaagaggccatatctaccgctctattctggaagcagttgcactgacgatgaagaagcatgtagatgatatgtgcgatgagctgggcgtcagtctcgacaagatcatcattaccggaggcggttccaatagcgacttgttcatgcagatattcgcggatgtattcaatatcccatctgtgcgtaacgaagtaaacggagcagcagggcttggctctgcaatctgcgtagctgttgcggcaggcgtatatagcagctttgacgaagcagttgccaatatggtaaggattaaggacgcattccagccagatccggagaaggtggcattttatgagaaaatgttcccaatctacacggatataacgaagcatacggacgaagtactgaagaagtcttacgaactcttccaataattttatatgaagccacttatcttgatcacgaatgacgatggcatccattcgccgggccttgcagctgcggcatgtgcggcggcagatcttgcggatatcttgattgtcgccccgcacacccagcagacaggtatggcaagagcatttccaagaaccgaggatgccgggataatagaagaagaatggatacagattaacgggcaggaagtgaggggctatggggttcatggctccccggctcttgccgttgcgcatggcgtgctggaactggcagagcgaaagcccgacctgtgtatcagcggcgtcaattatggcgagaatatgggagccgtgcttacatgcagcggcacgctgggagcggcatttgaagccgtaagccatggcattcccgccatcgccatatccctggaggcagaacttgccatccagcgatccaatgatttcaggcagacagactgggatgcggctaaaaggatgcttcattcatggataagccgggtgttggatagagggatgccggagtatgtagatctgatcaatatcaatatgccggcgggcagcggacatcctgacgaatttaggatcacatccttaagcaggcagaattatttcgaattcatccggccaaaggccaggaatttaaaggagccctttgcgcttaagtccaggctgtctgtagatatggatacgctggaaagagacagtgatatccatgcggtgtatgtggacaggattacctctgtcacgccgattaatatgaatatgtccataggtttaaaagaagcgatggtggaaaaatatatgtgaagaaacaggcctttttatggaggcttgtttttactgttatttcgattgactttaaagggcaatttgataggatggagttaacaatagattttgttaatacattttttctgagggcgtacgaggagccaccagacgggagaactatccaccggtatgtacagcccggacagagtctgctgatcggccgtccggcgggcaagtaccatgaactggataaggagaatgtagattgggatagttttgaccatacgccaagacagcagccgaagaagccggatccggccaaggcgaaggaaacgatgcgggatctgtggggaacatttacggaagaacaggtaaaaaaggagacggaacgatgccttggatgtggggcaaccgtggtggaccagaatgtatgcgtgggctgcggcatatgctcgaccaaatgcaagtttgacgcgctccatctggaacgccggtatgacgcccatgaagtcccatatgagaaactgattgtaaaccacatggcaccgactttgatgaagcggggagcaaagattgcggccaggaaggccaaggacatcacgcttagcagaaagagaaggcagaattgaaggtagaggcatatgcatgaacttggaatcgtatttagcgtagcggataaggtgctggaaatcgccagggacaatgaccttacagagattgtggccattaccatgcagattggggagatcagttccgtgattccggattatcttaagaaatgctttccggcggctgtggagagaagcccgctttttgcgcatacagaactgaagatcgagattcttcctgccaggtatctgtgccacagctgcggagaatccttcagtctggaacagttcaaagaaagcggcggctgtccggcctgtggggagcaggatttcctggaacttctgaccgggcgggagtgttttataaagaatatagaagcatattgatcagattttaagagcggcacgacatcttaggatgccaggccgctctttcttagttaattttcttcaacaatccaggtattccttagatattccggcatggcctcgtagaaaaggccggccaaatcctccggcgtcatatcctccggggtattgagccattcctgcagaatgcctacgcatccgtggcagtataggcttatggtatagcggtcacgcacgctaagcgaagtctgacccgtggaagacaagtagcatttctcgacgattccaaaggaataggaatataggaatccagaatgggcattctgtccggatgagcggaaggcacgccgatagtaccaggagtcctcggcgattcccctgcacatatgcagcaggaattccctccagctgcggcagacccgctggccgatcagccgttccgccaataccatggaattaaagttcaagacatcatacttgtcatggaaatatcggtagaatgtggactttgaaacaccgctttgattgatgatcatttccacggtgattttttcaaagggcatatggtttagtaattcattaaaggcatcgaaaatgcgttgccttgtataggaactgtgggtcatggcaaacctcccgtcaatcattctacggcagtaatcttaagtaatattataaatgataggagtcggaactgcaaataattatgtgcacagccgcacatttctgtgctatgattcgttaaataaagtgaaaggagggcttcatacatccatggatatagaagaacagtatgataaagtgtaccgatactgctacctgcggatccggcatcagcagacggcagaagatattacgcaggaagccttcctacgttttttggaggtccattcttaccgggagatagggaaatgtcttgcctatctatacacgatagcccgcaacctgtgcacggattattatcggaagaaaaaggaaatgccgcttccgcaggactatgaattggcgggggaggatgagcaggatggcctgatacagacgatggaacttagaaaggccgtaaaacagcttaaggaagaggaacaggaactaatcctgcttcggtacgtcaatgacgtgccaatcaatgatatcggaagaatcatgggcatctcccggttcgcggtttaccgcagattaaggatatgcctgaagcagttaaaagaagagttgggaaggagggaggattatgaagaaagagataaaagcaggacttaaggaaatatatgaagcgcctccgtcgcttaaaaaagatgaattccttcagaggatcggcgagccggaactgacccatctcgaattcctcaggatgcaggtacattatatccgcaaagggaactggctgatatcagtagtcttttttctgtcagcgctgtttgcgcttaggcaggcagaacttgaactgctgtggcccatatctgcatttgtcccgtttctggcgttgtctgtggtagcggagaacagtcgttctttgagatatgggatggaggaattggaactgtcatcaagattttctctaaaggccatcgtaatggcaagaatgggcgtgatcggtttgggcaatcttatgctgcttttgattctggcagcctttgtttggaggaggtcttcgcttttgacagccggggtctatcttctgcttccatatcttttggccacatttttgaatctcatgctggtcaggaaggtaagcggcaaggagagcatctactcttgccttggaatgacgattctggcgagcgctgcctctgtattaccaggggtgatgaacatttctatcatggggctaatgcgctccggctactgggctgcgcttcttgcgggcactgccatacttgcggggcgtgaaattaaaaaattattacaacagtcggaggaactggtatggaattaatcattgaccgattatcgaaacaatataagaacaagattgccgttgaccggatatccctgacgcttcatcagggcgtatatggacttctgggagcaaacggggcaggaaagactacgctgatgcgtatgctgtgcggaattttacggcctacaagcggcacggtcatgtttgagaatatggatgtatcaacggaagactaccgcaaggaactggggtatcttccccaggattttggatattatcctaattttacggggagagatttcctgatgtacatggcggtgctgaagggaatgacgaaaagccgcgcccaaaagcgatgcgcaaagctgctggatgaggtgggattaaaagaaatgggagataagaagattaagacttattccgggggcatgaagcagagactgggaattgcccaggctcttctaagccacccaaggatattgatcttagacgagcccaccgccgggctggacccaaaagagagggtgcgcttccgggatatgatcgcagcgttgggaaaagaaagcatcgtgattctctccacccacattgtatctgatattgaacatatcgctgaccggatattgctgatgaaggacggacagattattttcaatggaacacaggaggagatcggagaagatttagaagagttctatttgaagcagtttgaggaggtgggagaacatgcgtagtttctggttgctgactggttttgagtataagaaattatttcagcgtaagatcgtatggataacgcttgcagttatgattgcagcctgcatccttctgtcttgcatttcctacatggctaccggttataccattgatggggaacctgtcaatggatatgatctgaagaaaaaacatgtcgcccaggacaaggaagccagtggaaccaggcttgatgggaagacgctcaaaaatatggaggagtccccgtcagatattcccggcgggctattcaacatggtgtactatatcactggcggatgggaagttgatggcctaaaggaacaagaactataccagatccgtgagaacaatatagaggcaaattgggagagcgccaggctttccaagggagaaaaaaagtatatggcagagcaggaagagaagattgaaaaacctctgacatatgaatattcagacggataccaggaggcaggcacgcagatggtatttgtcgggctgctgcagacgcttctgattgccatctgcattccatccgtattcgcggaggaacatataagaaagacggatcagttgaacttatgcacgaatatggggaagaagacgctgtatctggccaagattgcggtaggtatttccttttcgctggcggccacggtgatgatggctctggcaataacaattcctacatttttgataaatggattggaaggatttgatgctccgattcagtcttttgccccgctggagtcatgggcgatgaccgctggagaacgattgctgatcatgatggcgatggggcttctggcagcgatcctgcatagcgcggccggaatgctgatgtcagagaaagcaaggggcaatgtagcgccgatggcggtgatggtaggatttatgctggtatccctctttgcaaccgtgccggatcagtaccgagcgcttgcgcaggcctgggatttggttccgggcaatgtcctctccgcgacaggcccattcggcgtgcggctgttccagatattcggaagatatctggctgcctggcaggtggtgccgattgtctaccttgcggtcgcggcagtatgcatcgtactgggtggccgcttatataaaaactaccaggtgagcggcagataagtatatttgctcaaatgattcggggattctgcatcttgcagaatccccgtttggtattgaagaaccaaagaaattatggtagcataaaaaccaaatcagacattcttttttattctatggcagatcgccgattaatccaatgttatgatttcaatccaatgatgtcaggggggatgcgcttgcgtgtgattttttgactttttatctgttaagaaacttttgcttgtgataagatgaaaggagaaacctatggacaaaaaacaaaacttaataccattgcaagagttgaaccttaccagccgcttcctgttcgacgaggtgctggaggatccccagatccatcaggacgtcctgggcattatattccagagggacatcccgctgcttgagaagaatgagacggagaaggaactccgggtatcgccgcttctgcgctccatccggatggacgtattctccatggatgaggagaaggccgtttataacacggagatgcagcagaagagaagggcggatctggcgaagcgcagcagatattaccagtccctggtggatgccgggcttctggagccgggcgtgccagattacaatcggctgaacacgtcgtatatcataatgatcatgccttttgacctgttcgggcataagaagtatgtatatacgtttcgagccagatgcgaggaggagccggagtgcctgctggaggatggtgcgacgcggatcttcctgaatacccggggagaaaacgatgacgaggtgccctgggaactggcagagttcctgcattatctggaggaaaccacggatgagagggcggcaagcacggacagccagcggatcaagcggatccataggcgggtgcgtaaggtgaggctcagcgaggaagtcggggtgaagtatatgcaggcttgggaagagaaatattatgaaagggaagaaggagcgcataataaattaagggaactggcggcaaagaaatatcgcaaggggatgtctgtgaaggagattgcagaattgcttgaagagagtgaaacgacggttcaagaactgctgaaggagtcagagatgagatgatctaatttcaagaatgtcatattgtggtagagaactggggcagtatgagttataatggactcaacagtagttttcaggagggaaagtcaatggaaaaatcaaaagtatattatacgaatatgaaggcaacgttccaggagaatcttccgcagaagttaaagcgcctgatcaagacagcaggaatcggggagattgactttgaaaataagtacaccgcaatcaagatgcactttggggagcctggcaacctggcattcttacggccgaactatgcggccgtagtagtgaatactgtgaaggagctaggtggcaggccatttcttacagactgtaatacgctgtatgtcggtggcaggaagaatgcgctggatcatctggattccgcgtatcagaatggattctcgccattctctaccggatgccacgtcctgatcgcggatggattgaagggaaccgatgaagtagaggtgccgatagaaggagaatatgtaagaaatgccaagatcggacgtgccgttatggatgccgacatattcattacgttgagccattttaaaggacatgagtctaccggatttggaggcgcgcttaagaatattggcatgggatgcggatcccgggcgggaaagatggaaatgcacagcgcaggcaagccttacgttgaggttgagaattgtatcgggtgcggcaactgtatccgggtgtgtgcccatgatgcgccgaagattacagacaggaaagcctttattgaccatgacaaatgtgtaggctgcggcagatgcatcggcgtctgtccgaaggacgcagtctgtcctccgaacgacgagtccaacgatattctgaataagaagatcgccgaatacagtcttgcagttgtgaagggaaggcctcatttccatatcagcctagtgatcgacgtatcaccgaactgtgactgccattcagaaaacgatatcccaatcgttccagatgtgggaatgtttgcgtcctttgatccggtggcgctggatcgggcttgtgcggatgcggtcaacaggcagcctgtgatggctggaagccagctggatgacatgccgcatacacatcatgaccatttcatcaattctgccccggaaaccaactggaaggtgtgcctggagcatgccgaaaagatcgggctggggacacaggaatatgaattagtggaaatctaattgggaattcgtatctcgttatattttacataccgctataatagaagccgggcctatcaggcacgaaatccttcgggattttgcgcctgataggcccggcttctatattgtgcgctgtcttcagcagcaaagagtcccagaataacttaagataaatgaaaggtttttgtgggaggagtatggtattatggagaggatagagaatttgacttatgttaggggcgtggaaaaatgaggatattattggtggaagatgacagggagatcagcgagatgctggaggaatttctgatacaggaggcatttgaagtggtcccggcttttgatgggctggaggcatgtgagaagtttgaagacggggaattcgacctggttcttctggatctgatgattccgaagatgagcgggatggatgtgatgaagacaatccgggagaagagcgtggtgccgatccttatcgtatcagcgaaggacagccttctggataagtccctggggctggaactgggggcggatgactatataaccaagccatttgtgatggctgaggtgctggcgaggatcaaggcaaatcttcgaaggacgaaccagtatgcggcgggcagcagtcggaagcaggaagagccggcgaccttgtcttgcggggacatccagctgaatccagctgatttcacggtgcgaaaaagaggaaaaaagattgacctgaccgcaaaggagtttgagatattgagactgctgatgcaaaatcccaagaaagtgtataccaaggagcagatttattcgctggtttgggaagatgcttatcttggcgatgaaaatgcggtgaatgtacatatcagcaggctgcgcaataagattgaggatgatgcccgcaacccggaatatatcattacggtgtggggattcgggtatcggattggagggtaaggatgaatggaatgatcatagggattctggctgccatctgtattctattggcagcggtatctgtcagggaaaacaggaaatataaggctttagaagataatgtaaagaaagtggcaagccagatggaacggatcctggatgaggatacggatgaaaaggtgatggaatttaccgggagccgggaagtggcaggactgatcatgcaggcaaaccgaatgcttaacgaccggcagagaatgaaggcagagtataaaagggcgggcatagaagcaaagaggatgctatctaatatttcccatgatatcaagactccgcttaccgtaatccttggctatcttgagatattgatcatgaatggggcaggcgagacggcgacgcttttaaagatacagaagaaggccagccagctgatggaactggttgaagaattctttacgctatctaagatagaggctggcgatatggattttggactgtccaagatatcgctgagcgagatctgccggcagagtattgccgatttctacagcatattgaccgagcggggcacgcaggtggagattgagattccagagagagacatctatgtatatggtaatgaggatgccatccgtagaatcctgtttaatctgattaccaatgccatccgctatgggttagacgggaaatatcttggaattttcctgatcccgggagaagaagaggtggaaatacgcgtcagggacaaaggaaaggggattgataaagaaaacgccgcgcatgtgtttgaccgcctgtatacgatggaggactccagaaataaggaaatgcacgggaatggcctgggactttccatagccaggacgctggcgggaagaatgggaggggatatcacccttgatagcgttccgggacaggagacggtatttacattgaaaatgaaaagacatcattatctccagtaagacctgccgaaagaatttcgtaagaattggtcaagagttttgaaaaaagaatccggtatgatagacctataaagaaaacgaaaggaagaagagacatgacatacgcattagaaacacataatctgacaaagaacctctcaggcagggatatcgtatcggatgtaaatatcagagtgaaaaagggggagatctatggattccttggccctaatggagcggggaagacgtcgatcatgaagatgatcacgaatctgtggaagccgacatccgggtatattaccgtgatggggaagccgctgaatgacaattcttatgacatccttaagaggatgggaagcatgatcgagtatcccacattctacgacgggctgaccgggaaggaaaatctcaagctgcactgcgaatatatgggctattacagccctaactgtattgccgatacattgaatatgctgggcctggccggagcggaagacaagaaggtgcgcaattactccctgggcatgaagcagagactgggaatcgcaagggccgtcctggcaaagccggaacttctgatcctggatgagccgaccaatggcctggatccactgggaatgaaacagatcagggatctgcttcggatgctgtgcgaagaatatggcattacgattcttatatccagccatctgctgtcagagattgagaatgtcgcccatacgatcgggatcatgaatcacggcaaactgcttcaggaaatctccatggatgccattacggaccagaactttgcctatatcgaacttttggtttctgatgtgaaaaaggctgcctatgtgctggatgataagcttggcatcaataactttaagattattgatatcaatgtaatcagaatctatgacgtcagcatatccgtggaaagagtctcaaaggtactggcggagaacaacgtaggaatcgaaggcgtaaccaagaagcaggacaccttggaagattatttcctgaagcttacaagggaatagggattaggaggaatcaaaatgggaaaattaatcaagcttgagtgggaaaaatatgagataggaaaatatatacgcaatgcggcaattctgatcgtgcttctggtgatctttaactatgccatgacatttctggggatcgccaatgacccggatacaggagtgccggatatggcaatctccaatatgggggtatctaccaacgtagaactgcttacagacataacgttcctgatatttgcggcagccatgcacgccacatttatcatcggcgcatataagaataagaccatgaacctgatgtttctttatccgttaaacaggaagaagattatggcggcgaagatgctggcagtctgcattttctgcttcgcaggcatcgtgatagcaaaattggcctgctatggagtcagcaatctgggcttcatgatgggtcagaaggcatcctttccgatggattacaatatgctaagcgtctccttctatatccagctgcttataaggtctgctgccaccatcagcatcagcctgctggcgctgttgatcggaatgatagcaaaatcatccaaggtcacagtcatatcatccttcctgctgatcatcctgatgcagggaaacgttggcggcgccacgttaaaagacaatttggcggtaccgatcgtgctcatggcgatatccgtgctggctgccatactgatcgtgcagagggtggagaagaaagacgtgatgtgatttatcaagaatttcaatattaattgccaagattcattggatgttataatatatctgtatgcgaatttgagaacataagaggaaaatatatggatatattaaaaaagttttggagaagcgtcaagggtaaatgcctgatagccgtcctggtcttactggcagcctttgaagtgcataatgcattggagggaaaggaaggcgagaagcagattacgcagacagaggcaagaaaaactaaaagagaagtcgagtatgccaagccagtggatgatagcaatcagatacttgggaagttcaaggaacaatttccggaagcctctgtagtgcttgcctgcgaggaagatgtgacggacgatggatgcaaggatctgatcgtgatctataccgagaaggaacttacaaggacggtggctgtgatagacagcggagacggagtaaattataatttttccacgccgataccggggccgattgaaaaccagaagatacagtttaagaatatcgataaagaaggagagattgagataatcgtaacaggagagaaaaagggagcggtaggctatgccatctaccgtatgattgatggagaaatggtcgatctgtttggggaaggtatggaagactgctgctagagtgcaaaaaggggatgttttcgcatccccccttttcattctttgctgtttcatcttacaggaagaactgatacccctttccccataccgtacgtatatggaatggctgggaagggtcgtcctcgatcttgctgcgtagttttttgatatataccagaatcgtattgttatcggaaccatcatttttccaaacttcctgaaatagttcctgtttcgagaatgtatgcccgggatgatccataaacaggcagagaagggcgaattccttggaagtaagcgcaatctctttcccattcttaaatatggtctgagaattcatatgcaaggtaaaaggcccctttaggataggtgactgtatgctctctgcggttgtggcgtattggcgtgtgcggcgcacaagggcctggattttggagacaagcacagtcttgctgaagggctttgttatataatcgtctgcgccaagacccagaccctctacctgggcagcgtcttccgttttgccgctgagcaggatgacaggcgtatagatcctgcgcctgcgcagttctgccagcaggtcaaagccgtcctgctccggcatgataacatccaggagaatgatatcaaaggtattttctttgaggatatccaaggcaaactgtccgctgcctgcgcaggatacttccatttgctcgcgctttaagactgcgctgacagccttctgaacggcagtttcatcatcaatgatcaggaccgatatatctgacatattgttacacccgcctttctgctataatagccataggtagattatatctgcctggaattttaaagtcaaccgtcgaaggagcataagatgaagaagggaaagaagaccagacgaacacggatagggattacagcggcagtcacggcgctgattcttttgattgcattcttctgctaccagactgtcaagaagacgattgtcaataacgagaaagaaagcatggcaggcattgcaagagtaagcgcccatagtcttgagacgagccttaaggcaaagagcaatctggtatatgcggcgttatccggagatatggacaatgaagaggatatccagcagaatatgctaaagacaggcgagaaaagcagatatatcccggaagataagatggcggctttaaaaaaatgggagaaagaggcatgcaaggaagccgggataaggcccggagaggtaattgcggggccggtctttcatcaggaggaaggctattacgctttatatttgacgaaagccgtgtacatagacagaagtcttgcagggtatgtgcaggtagaattaaacctggatgatatctatgaagaagagcaggcattgtccaacctgaaacttggaaatcagggatactgcgtggtaaaagaggctgacgggactacggtcatgtcaggggagcatgtggaggcagaagaattctccctggcgggggatgaaggcgatggatgccgaatcgtctggtcctatcaggttcagcaggggactcccgagcgcacgcgcaagctggttgcctatgacacggcagaattcgcgggcgagaaattcattttatgcattatagaaaattatgacagtattgtggagcctatagacaggatcgccctttatcttgccatgctgggactggctctgctggtatggcttggcatcttcttatgtcgcatggcagagcagcatagagaagaggaaaaactgaagatggaattacagcatgaaaaggaactgaatgaagcaaataaggcgcttgaaaaccaggagaatcttatgcagaagtataatcattcgaaaacaatgacggtgctatcaggggctattgcacatgaattcaataatcttatgacgccgatcgtgctgtacagcgaattgctctgtgaaaatgaggaggtacaaaaggagatggcccaggaggcaaaggagatgtcggatgcggtcagccgctgcgaggtgcttgcgcgccagcttttggaatatagcaggcaggggagggcgaagaaggtaatgaccgtctataatgcaaccttcgcagtcgaaagcagcgtaaggatggtagagcgcctgattcccactaatataaagattcagacatctatatgcaagaccaaatactatatcaaaggacagataggggcccttaaccaaattatactgaacctggtaaccaatgcaatgaacgcgatcggggagaaatgtggaaagatacagatacagttcggactgagcacgcaggatgagcgcatggtcaggcttgtggtagaagacgatggaggaggaataccggaagagatccggcagcgaatcttcgagccattttttacaacaaaggaggaaaatgagggcaatgggataggtcttaccgtcgtcaaacggctgacggaagagcatggcggagtcatccgcgtaaaaagccagacgggaaagggaaccacatttattttagatttcccatggatagagagcagtcacgaataaaagagatccggccatcttaattaagaggccggattttgctttattcataggtttctctgtcttttagatctttattcagataagaagtggctgtatcggctatatctactgcttccttatctgagatgccgtctatttcttttgctttgttataccagtcttcaaatgtcatgccgatcggcatcaccggatcaatgttttcctttataaacgactcgaaatcatcgacgcctgcatcctcagatatctcggttgatataaatttgctgacgtcatttacctgaggaatttcttcttccggtatctgaggatactgtgtgaaataatgttcataattctcaatattctgttctgtaaaatgccaggtgatggtgcggccttccgctaccgtcttcatgtagatcgtgcgcagggcaacgtaaggatcaacatcaaatccgtctgcaaacatcatggcagcattgtaaggatgctcgtacatatatttgattgccagttggtgggcgtatacaagccgccttgcaagttccgggtgattgtctttgaactcgttggacatagcatagatgcagcaaagtccccatgtgtctgcggttgattcggcatccacgtcagcggcgccccagccaattcccataatttttccaaatccttcaaattcagcgatggacgcataaggatcgcagcaggtaaatgcatcgatctggcctgcttttaaggcaaagcaggcatcctgctgacccatatctacgatgttataactgccggcatccgccgggattccaagtttctcggaccatgtaaggaattccgggtcaatttctggggtggcggtcatggaaccaatagtcttgccaaccagctcctccggctttttgatatcattgcttacgaccagatagcgggagcctcccatgtggttcgcggcagccatgcagaacggagcccccttattgactgccaggatcgcgccttcgataccggtatagccgacatccattgcgccgcttgtgagagccttcaaggtctcggcggatttggtcacatttacattaagacccatggccttgtagatgcctgccttttcgccgataatcccggcaaccatgtgatcgcagttgaaatagcccatttcgatggtgtagttcttttcctcttccgacagatcaccgaactcgaaatccttaaccgcttctttgggatcatatcccgtagcctttacatctttggtagcggtctgtgtgctgctgtcgtggcaggcggtaatcaccggtaccagaagcgtaacgacaagaagagccgctagaaatcttctcttcatagttcatcctccttgaaaatattaatttttgttaatatttggtaatatgataataccagaaggaacgtcgaatataaagttgacggtctcaatatcgtaatttcaaataaataagtagataaatataggaaatgcaaataaaagaagacagtccgcaaactgtcttctataaatgctactgtaataattcgataaaggcgcccagacgggtattgatctgtgcctggtcggatggagaatagtcggtattgatagcaatataaggaatgtgcttttcctttgtgacgaaggtcttgaccgcatcagactctatggcaaatgtatggcaagcctgcagaagcacctccacgactccatccacctgatattcatcgatttgaacgtcaagcgcttccagccttccagggttcggactcatgacggagcagtttacccggagatacttttcggcaattgcggtgattggatctttcgtttcgtcgatgggatcctttttctcgcggggaccgcagcagttctcgaatcccacaacgtccgcccccagttcctcgatacgtcgtatgattttgtccattacgccggtagtcgggcatccggtaatcagaatcctgggcctggaaggcttgccttgatattcacgttcgtacagatcctttagttcggcggtacgtttttcaaggaaagcgatcttctcttccaggtcaggggaaaactcattggaggagatgacggtactgatttcgtatccagtgattggggaaggcttgagtcttgcaacctcaaaaaaatcaagaacggccttgcgttccctgtttcttaagcgaatagcgcttcgtaacttgtcatccgttatctcgatgttatagaactgttccaggtcttccttcacgctgatgacttcctgcttccagaaatccaaggctccgcggccggtctttccaggcggaagctgcatgatatggcagtgctttaactccctcatcaattcatacattttcttcttcccgtcacaggtcgtctccgcgaggaccatatcggaaaaatagaagaatggacagcgatccgttacggccgcgccataacttgccttgatcagcggacacaggtttttgggaagcctgatctcggcagccggaatattgtcatctccgatgccgcatagcaccacggcaaccgcatcggccgcgttgatcagttcccagggagtataagtacagaagacccccacgatacgccggccttgctcttttagttctttcatagtgagaaatgctttttttctggcctcaggataggtctcgaaattatccggcagaacgaattcaggcatatgaaatacctcctttgtatttagtaagattcattagattcattactagatattatagaggagattgtactgaatttgaaatcgaaatagtcaataactatataaatacaatctattagacataatttagaatgacttttaaaataaaggaaaagacttacatttttggagaaaagaggaagcatatgcgcctggagtacataagaagttttatcagtgtcgtgaactgcaaaagtttttctgtggctgcaaaacagattttcttatcgcagcctacgatcagcacgcatatcaagcagctggaatcggaactgggtgtccagcttctggtgcgttcgaccaaggatgtgattctgtccgatgcaggcgttatcttctatcccttcgcaatgcggcttcttgagacggagagcgaagcgcttgcacagatacacaagaatgaaatggaaataaaaggaaccgtgtcgatcgctacatcttcggttcccggtaattatatccttccgcagttttttgcatattcaaggcaggcatacccggatatcaattacaggatatccgaaggggacagcgccgaggtactgcagtcaattttacattttgagacagatatagggattgggagcatcagaagcaataacgacaaatgcatgtgccagccattggcaaaagacaggattgtactcgtgacgccgaatacggaggaataccagaatatgaaggggaagtttcctatcgacaggctgaggcaggagacgtatgtgctgagggagtcaggaagcggaaccaggtttgcctcagagagtatcgagcgggcgctgaatctggatgccaggcctttaaaggtggcgctgcaggttgagactagcgagatggtaaaaaggggagtggagcagggaattggagttgcattcatcagcagccttgcaattaaggattcggtcgcgcaagggaagatattgaaattcgagtttccggatatagatacaaacaggcagttatatctgctgtaccacaaggataggatgatgccgcttccggtgacgagcgtcatcaagatcttgaggcagttctgccagaacttatagattgtttggacgcaaaaagacagatctcttaaatagcagacctgtctttttaattcctgaaatatctgcgatagcaggcaatctggtggccatgcctccgtatgctatctattgagccctccattttagaaggaccttttctgccagaaccatcaatgtgtcaattaagaagccgatcagtccggcaattaccatataggcaattactttttctgtctgcatctttgcctgggcttccaccatgcagtagccgaatccggcactggtcgcgataaactccgctcatatgacggacatccagccaagccctacggcaagcctgagcccggtcagcactccggggagggacccgggaaggacgacatccttgatgacgccgaaagtgctcgctcccatagaccttgcagcatgataataatctttgctgatatcctgtactccggatatggtgttcagaatgattgtgaagatgccgctgaaagcaatcaggaaaatggttggtccatctccgattccaaaccatacgattgcaagaggaacccatgccataatcggaacttgccttaacgaattcataaaaggagacaaggcctttagaatctggggggagtatcccatcagcattcccagagggaatccaatgatgaacgcatagagcgatcccgttagaactcttctcatggttattccaaggttgcgcagcacgtacagatccgtaagagagaatcccacctccttgaacacatcttccagatacggaaacaagaaaggcttatctacaatgtgtgcagcggcaaaccagatgatacagatgactgccagaccgataagcgccgcgacatttcgattcctgcccccgaatttgcgccatcttccccggtcgccggcattcgtggcggctcgcatccgatctacctgctggtcatgattttcttccaacatatttcctcctttcttccaaaatcagtaagaaaatcataacaaaatcaataagcggaaagtaggattattaaggaataaaatattaacatttgttaatattaggatttttaataaagaaacaaaaaaagcagatcaacagatataatgagggtgcttgtacaaatatttattattagaaaagggtgggaaaatggaaaaaccatgtattgaatatattagcgcatgtgcatgatgcgaggtgtttggggacttggttcaagttctggagaaggaatatgagggcaaggtgcatgtaaagatttaccgtgcgggaaaagactttgactatattccgaaatatggggcggttacgaagagcatgctggtgatcaatgaaaagaaagccgtcacaaaacttacaaagccggcggtgcgcgatgcttttaaggaggcactgaagtcatgctagtggattttggaaattttatactcaggattctgaattcttcatggaatatgctgaatagttcgtcggggtggatgatattcagttttatcgttgcaggagtgctgcatgaatttttgaagcctgagaaggtgcagaaaacggctattgggtcatcgagggtgagaggcgtcttttggaccacgatatcaggaatgtttataccgatctgcagctgtggtacgattccgcttgggataagcatgtattatagcggcgcgtatctgggacctacgcttgcatttatgacgagcacgccgatgatcaatccgattgcccttctgcttgcctttggccttttgggcaaggaagtggctatcatatatctgattaccggatttgtagcgccgatgattatcggaattgtagcaaatagatttgcgaaagaggaattacatataggaatgaaaaggcagaaagaagaggcatcgcttcagatcgataccgatgaggaggatggaagcgagcctatgatacagctggaattcgaggagccggggttctgggagaagataaaatcagggcttcgctggtctttgacggaactcagcgtgaccatcagcaagtataccgtgacgggtatgctgattgcaggcgtgctgtttaatatcgtgccgcagtcttttattcaagattatctggggaatcccggtttcgtatctttatttggaattacggtggtagcggcgctgatgtatgtgtgcgcggtcggacatattccgtttattgccgcattggtggcaagcggagcggcgccaggagtggccatcacatttctgatggccggagcaggaacgaacattccggaacttcttaccataagcaagacgattgggaagagagccatgcttatgtatttggggatggtggtggttatttccaacattgtcggctatatcaccaacaggcttctgatgccgggatttacgccggtgctgaattatgatcagacacagcataccatatcctatgcgaataaaatgatcgtagtcatgccaggatggatacagaatttatgcagcgggatacttgtatgctatgcgctgtattctcttttcaagattatcaaaggcagggccggaaagcagtgtgtggcataagtcatgaagattcagagagcaatcgtcataacgctgatcgtttttttggcagccggacttggagcggcgttgttccttccaaaagaaaagcggtggaacaaggaggctgagataaagataggcgccggtgatgacatatcaggagttttaatggatgaaacggtagaggcattaaaggactataaggtttccaggacgcatcagagttcttcttttcaggattgctgcagcaatacggcgcagtgggcaatgaatgctaaggagattaatgtgggattttactgtacccatattgccaggcatacggtgatgcagaatcaggatgtagagatatatggcccagtgattatgaacggcgagactatcgtatataaggatcactgggagaatgtagagaaccttgcggttacgcaaggcagagaaaaatccaaggctttggcccaggaaacgtatccccagatccagggattcaatgagattacccagaaaggaatcctgtacgcattggaggatgagcaggtagacgcggcgatcctggacattacgaaggcggccaaagtgcctgattatcggaatatgccgctgtcagatacggattatatatcttatgtactggtggtggataaagaattcgaaaagacagaggcattccgggattttatcgacagttataaccgggcggtatcacgtttgagcaatagcgactatctggcctggacgatgggcgtaaaagaagaatggctggaaaataagaatataaagtttttaacattagaagggacaggagtagattagaatgtcaatttcagtgcagggaatttcaaagagttttaaaggaagaagaaaaggcgagccagaaaatgaagtattaaaagatgtgaactttgaagtggaagaagggcagttcgtatccttgctcggaccttcgggatgcgggaagacgactacgcttacaatcattgcggggtttcagaaggcaacggacggagtcataaaggtcaatggcgcagaagtggaaaaaccggggccggacagggcgtttatgttccagaattatgccttgttcccatggcttaaggtgggagagaatattgaatatcctatgcggaagatgaagataccgaagagccagagaaaagagcggctcaaagaactgctggaaatggcccaactgacggagtatgagcattattatatccacgagatatcaggaggcatgaagcaaagagtggctctgctgcgggcgctggcctgcgaccccaaggtgcttctgatggacgagcctttaggggcagtggatttccagatgcgccagcttcttcaggtacagttagaaaacatgctgggacaaaagaagacgacatctcttatggttacccatgatgtagatgaatcgatatatcttagcgaccgggtgatcgtcatgtccaggaatcacggaaagatactggaagacgtaaagattgaccttccaaggccaagagaccgcacgacgccggaataccatgcatatgtagaccatctgacagagatactgaagtctgcattggatggaggcgtatttacccaggaagacaaggatattatggaattcatccaaggcgtggagagtggaaaggaaccacttagggaggcgatgggcacatccgcataattgagagaaaggataatggagacttaagaatacgttacggatatggaactggatgcggcttccgtgattaaggcagatatgttaaagcagtggaagaggcgaaagcgacatttgaagtataattagaaaaaaacaggaggtacaaagagaatgaaggtagcttacttattggaatcagaacatgcaagggaaatcctggagacgatgattatcccgcagttagaggaagaccgccatggcgcagaggtggcaggcatgatgtttttcttcgacaatgcctatatgctggtagagggctgtgatattgccgccaggctgcaggcaataagcgagaagacaggcatgcttcttatggcctgcgaccgctgctgctatcagagagatattgcagataagcttgttgcgccggcaggtatcggctgcttccctaatgtatacgcagcgcttgcgccagccggcgttgatcaggtaatcacattataaggaagacaggatgatgtccatctaccttttgggtaaacagtttatagagatggccattgacgggggcatccttgcagaaggcaaggatgctttcttcatcttcctccataaatcttagcgccagcccgcagccgctgctgatggcgcccggaatgggcatgatggccgcctttatccgttcctttgcatgtctttccgcctgcatggcatcggtagtggtatcgaatgccatgatataataatattctggtcttcccatatcaaaaaaactctctttctgctatgcttgatcttaagacttattataccatagatgccggggaagcgtaatagcagaagcgaaaggaaggcgaggtctggacaaggcagatctggcatgctattatcgaaaaagacggtgtaacgattcatatttaccagaaagataaggagtaaggtatgatgaaagaacaattagcagtagaagtgatagagcgtctgaaaaaggaatacccggatgccggatgtaccctggactatgaccaggcatggaaacttctggtcagcgtccgtctggcggcccagtgtacggatgccagggtaaatgtcgtggtggaagatctgtatgccagatacccggatgtggaggcgctggccgcggcagacgtagaagacattgaaaggattgtaaggccctgcgggcttggaaagagcaaggccagggatatcagcgcctgtatgaagatattaaaagaagagtatgacggcaagattccgagagattttaacgcgctgctaaaacttccgggagtcggaagaaaaagcgctaacttgatcatgggggatgtctttggcgagcctgccatcgtgacggatacccactgcatccggctgaccaaccgtatcggccttgtggatggaatcaaggatccgaagaaagtggagatggcactgtggaagatcattccaccggaggaagggagcgatttctgccacaggctggtatatcacggaagagatatctgcacggccaggacgaagccattctgtgacagatgctgcctggaggatatctgtgcgaaagccggggttgaaagttcaatataatggatataatcataagacaggagtagcatcgtattcatgatgttactctttttagcaagaacctgagaatggagggacaaaggcatgtgcggcagatattatataggagactatgtttctgaaaaactagaagacattacatccggaaggggaatcagccagatcaagactggggatgtatatccttcccaggaggccgccgtattagtaggaggcgaagatggagcgcagacgagaatgatgtgctggggatttccacagagccgtggcaagggacttttgattaatgccagggcggagacggcaatggagcgtcccctgtttcgggatagcatccgcaatcggcgctgcgtggttccggccagccatttttatgaatgggatcagtccaggaataaggtgaccttttgtagagaggattcgccggtactgtatatggcaggcttctaccggttgtttgaggacaaggagcattttattatcgtgactacgaaagccaatgattccgtgtccggcgttcacgacaggatgccgctgatactggagcaagaggaactagaaaactggctgcatgacgatgactgcctggaattcctgcttggcagaatcccggcagcgcttaaaaaggagcaggaatatgagcagcaggcgctgccatttatataggagggatcagttatggcgaggatactggtagatgcggatgcctgcccggtggtggcgggagttgaggagatggcagaaaaatacgatcttccctgtaaattattctgtgatacgaatcatgtgctgaagtcctcctacagccaggtggaagtcgtaggagcaggggcagatgcagtggatttcgcccttatcagccagttaaatgagggcgacgtcgtggtgacccaggattatggagtggcggccatggcgctgggaaagggcgcatatggaatccatcagagtggaaaatggtacacagacgagaatatcgaactgcttctgatggagcgtcatatggctaagaaagcacgtagggaaaagagcaggcatcatctgaaggggccggcgaaaagaaccaaagaagatgatgaaagattcaagatttccttggaaaaacttattttgcaaaagatcttttgcaaagattccaaagataattgctagccaaaaacacaggcatatattacaatatgagcatgcatttgaaagtaatgaggtatagactgcgatgatatgtctctggcgctggacctggaaggatcaagctgatcgaaatgtcggcagtcaagggctttcagatcatgtaggacgagtagatggtaggatttatcgcttgcgtggcgctcgtatttagcatattatgcttctataaaatacacacgctaaaaaaggataagactaaggaggacaggggcaagtcccgggaaacagaggctgttccggatatccttgatcaaggatgtaaaagagattattcagtaaaaaagcagtttaaaacagttgcattgtgcagctgtttttctttttttaataaaactatgttgacagacgacatatgtcgtggtacgatatagaaaaataagtcgtcagacgacatagcgcatggcgatatattaggaggaattagatatgagaaaagaattatatataggaatcctgttgtttttcctgacactttgcgtaaaatacgtagggcagatcccggaattcgcctcaggagcgctgctgggtctttctatctgcctggaaatcatcgggatactgccccaagaaagatatatgaagttaaagaactttaagaaaaggagtctggaaagatgggtaagaaagtagagcctttaacggagagttatttctacattctgctttgcctggcaaatggaccgaatcatggatatggaatcatgcagcggacaaaagaattgtctgcaggggaagtaaagatcggatcaggcacgatgtatggcgcaaccggaaatatgacaaagaagggctggatcgtagaaagcaagggcagtacagaggattctgaccggcgcaggatgtatgaactgacggaagaaggaagagagatcctggatacggagattaggagattaagacggctgctggcaggcgcagaagaagttttggagggaaagtgatatgggcaagcagaaaataagccatgctgcatatgctgcatgggattacaagaaagagattgaagacttgaacaagaagtcgcaggaaggctggcagctggtaaagggaggatgcttcaaaagcatatatgagcagaatgatcaagtatgctaccgctatcagctggattataataccgatatagagaataaggtgctttatttggagatgtttgaggatcagggatgggagtatattaattctacttttaatggctggcattttttccggaagccttataatccggaattaccggaagaagagtatgagatttacacggactcttcggcaattccggatatggagcgcaggtgggtacggctcgcctatagttttactgccgtgatttctgttttcctgatttttatgatagtaagaatgatacagtatccggaatggaccagaattccattgatacttttggaaatcgactttattgtttttctcggattgggaatctatcgcatccggaaaaaggaacggcattttaagaagatattttccttatccacgatgatgattatagcggttgtatgctggaccgcggggagcgtattgggagccttaaagcctgattgcagcaatacattggaaggagataccaatggggggacttattataaggattttaccgtgcattatccagataatttttatctggatcttgagatggataatgacagcccagtgacgtttcgtattgacgatgcaaacggtgaagcggtatatactaacagcgataagaaaacaagagtagaaaacaagcgtatctggctgaaaagaggagactacaggatcggcattgccagcgagaagggcgataaagcccgtaaaataaagatttcctacgaacttgactaaaatgatgatagaggagtatggcgtgcggcattaataaatgatgctgcgcgcctttttttactttataggaaagttctcctttcggagaacttggggactaaaatagcccgctcaaaagcgggcatagtgaatcagacggtttggattaaaagatgtaaaagccctcttcaccaaaatcgtcatcatcaaggttatcaaattcatgtaagaaataatccatatccagaagttcgtcgtcactcatgtcatggacttctttagaagtcataccttctggtggatttttaatgtactgttcccttagttcctttgcgagctctgcttctgttatacgtttcatagtgtggcctccgttcttaagatatattgagtttatcatgagaaaagaggttttggaagatatgaaaacgaggcaggcgaacgacatctatgtttttgcatagccttttcgtataattcatgcaaaggaacaggattatgattaaaatatagttctaaaaatagcatggtttttccacagttcggacattttaaaggatcgtaaccaaaagaatgtaagattgaatcacgccacctattgagtgaaagaaaaaagttatgtttttctctggaaatggcttttcgtaaaaaattgtcagaattacggtgacgagcgtaaataccataatagcgaatcattttaaaatgtttttcagggatgtgttgtgttaagcggtcaatgaattccaaaacaggaacagtttctgtaataagtttattgtcttcatgacggttgtaatggaaggtgacaaaatcaccatcgtaagaatcaatgcgagaagtagcaataacaggtctgccaagataacgaccgatatatttgataacctgagaaggattacacttgttaggcatggcgcgaacataaaaaccatttttatcttttgcatagatagcagattttacttttttgaaagctggacctattttttgatggagttcatttaaaagagcagtttggaacgcatcacgtaaaaaatgatagttaaaatgtttgaagtgtcgccaggaaagagtattaccaacaccaccttcagaaacaaggcagtgaatgtgaggattccattttaaatctctgccaaaggtatgaaggacgcaaataaatccaggagtaaataatacagatttattttctttatggaacatacgagaaatcacgctgttgactgccgaaaaaaggcagttaagaagagaacggtctttaagaaaaaaaggccgcaaagaatcatcaatggtaaaaacacaatgccgatgttgtacatcaataatcttaaaagacatagcagtagttctgtcaatggaatacatgttaccacaagttggacagaagcgagaatgacaacgaaaagcagtaaatttgaaattaccacaattgggacaaatatacatggcgccaccataagatggatcgccacaatgaatcattttttctacattctcaacaatagcatcacgaggatgttgaagataaatcatttcttcataatgttcgataaaaattttttgtaagatattcataagaccattatgaagcaaaatgaagcaaaaagaaacccctatccctcatgattgaggggcaggggagttgaagtgtcgaagacactatttttatattgacaaaaataactgtaacaagtataattacatataaaataactggaacaaaagtaattacagataaaaggaggcaactatgagaaataagaaagcaaagtctattaccgtattaatacttagccttgcccttgtgcttacggcatgtgggtcaaagccagcagaaggcagtactgaaaacaaggcggaagagacaacagaagaagatggcggcggccaggcgtcaaaaacagtttttggcacgttcgaatccaagactcttgacggagaagatgtatctcaggacatattttccaaggcagatcttaccatggtgaacatctggggaaccttctgcggaccgtgtatcaaagagatgccggaactgggagagttaagccgccagtatgcggacaagggcgttcagatcgtggggcttataagcgatgtatccgatccgggagatgagacggcagaagatattatttcaactgcaaaggcggattatacgcatatggtagcctctaatgatctgcagaatggaattttaaaagaagtatatgctgttcctgccacatatttcgttgataaagacggaaaccaggtaggcaaggcttatccgggcgcaagggatatggatagctgggccaagatcatagatgagatgcttgccgaggtacagccatgagcaggcgcaagataatcggaatccgcattgcgctatttgccgctgcggcagtatttctcttcgtaggcgctgctcgcggcgaagccggtaccgtgtttacgaaagccgtaaatatttgtctggagtgtgtaggaattggctaatatgataaaagtaataaagaaccgtatgaggctgtgggtacagatcgtctttacagccgtaacaaatggatatctgcttggttttcttagaggccggatatataccggcccaactaaggcggcctgcgtgccaggcctgaactgctattcctgcccgggagcgcttggatcatgccccataggctcccttcaggcagttctgggaagccgggattataagttttccttttatgcagtaggatttctgctgttttttggctccttatttggaaggtttgtatgcggatggctgtgtccctttgggctggtgcaggatttgctgtataagataccattatttaaaaagaggaagaatcttccgggccataaagtgctgatttgggcaaaatatgttatacttgtattattcgtaatcctgctgccgcttctggtggtagatttcactggccagggagacccctggttctgcaagtacatctgtcccagcggtacgcttgctgcaggaattcccctggttcttctcaatgagaatctgaaacttgcggtaggaaatctgtttttttggaaggcagcaatcctgattgtactgattatactggctctatgggtttaccgacccttctgcaagtatctgtgtcctctgggcgctatctacagtttctttaatccggtggcgctgtacagatatcagatcgatgagagcgcctgtaccaaatgtggaaaatgcaagaaggcctgcaagatggatatcaaggtatgggagaagccgaacagcctggaatgtattcgctgcggagactgcgttagggcgtgtcctacgcaggcgatcagcagaaaaaaaggaggttgccatgaaaaaaatcgtgaagcggattagttttgccctggcaggcgcagcattaggatttgcgtactattcatttatcagctgcagcagcgggggatgagcgatcacatccagtccggtatggacggtggctgtaggaacaatattgggcctgctcttgtcctattgttttgaagacagtaaggatatgaaggaataaaaaggttacggaccaatagaaaaggaatgagagaaatgacgagtgaatttgcaattgcagtgcatgcgctggtgtatctgcatcataagaatgccgtgctctcaagcgaagagttggcggaaaacatctgtaccaactcggcacgggtaagaaaggtcatggcaaaacttaagaaaaaggaattgataggtacaaaagaaggcataaagggaggttatcatatgtccctggatgcctccgagatcactcttggggatatctgtgaagcgctgcaggtggatattgtaaaggccgcgtggcgttcgggaagtatggacatggactgcatgattgcatccggaatggcgggggtcatggatgggatttatgcggaactggacgaaatatgcaagaagcgcctgaaagggattacgatccaggatgtggaaaagaaagtagccggatgcaagaagtaagaaggcagctggattattttgatatttcgcagatctgcgactcaggccaatgcttccgcatgtcgcggctggaagatgacagttacgctgtaatagcaaaagacaggtatctgagacttatacagaacgataaagagtgcttgttttactgcagtgaagaagagtttgataccttctggaagggatattttgacgcttaaggaatgcaacctgggctatcgcagcaaatatgtggtgcgaacggcgagtattttatcatgagttaatgggcaatcgctgatcagcgattgcccaatgtttttaagcagtctacaaactccagatcttcgctgttcaatttgatattagagcaataattcctgccatccggggcggtgacggttatctcgatgactgacccttccacaagcgcttcctgtgagactgcctttaaaaacagcggaaacttcggatggcccgcacggaaacggtccaggcatccctttagtttctgaagcatcgcgatctggttaaaatccatattcattgttctatcaactcctttgactatttctctatgaggcattatacttgagttagtagaaatagtcaaaggaggtattatttatggacggaattatgattccttcttttgatggaacgaaactgttcctgaagaaagaagcagcggcagatgccagtgccatatgcgtgatcgtgcatggactttgcgagcatcagggaagatatgattatctggcagacctgttccatacgtcgggaatcgggacctaccgtttcgaccacagaggacatggaaggtcagaaggggaggagtcctattacggcaattacaatgagatgctggatgatgtaaacgtgatcgtagataaggcaattgaggagaatccgggacttccggtattccttctgggacatagcatgggaggctttgccgtatctttgtatggcgccaaatatccggataaagcgttaaaaggcattgtaaccagcggagcattgacatttgataatgcaggattgatcacgggggtgcccaaaggtcttgatccgcatcagaaactgccaaatgaactgggcgggggcgtgtgctcagttgcagaaatcgtggactggtatggcaaggatccatacaataagaagacctttactaccggattgtgttatgcgatctgcgatggactggagtggttccgggaggcaggcaaggaatttgcctatcctgtactgatgatgcacggggaggcagatggcctggtggcggttcaggacacctacgatttctttcagatggcagcatccaaagaccgccagatgaagatatatgggggcctgttccatgagatctttaatgagtattgcagggacgaagttatcagggatgctatcagttggattagaaaccgtatataaagcataacgattgtataagcgagggattcccggggagcgtcacatctttccgggattttcattagacggtcggcggaagatgctgattaccagaaaagattaatcgaggaatataacattgagtaaaaaaactgcggaaaaacttctgaaacaatattttggctatgatggattccgggaagggcaggaacagttgatcgaggctgtcctttccggcagggatgttctgggtattatgcctaccggtgccggaaaatctatgtgcttccagataccggctctgatgatggaaggaattaccttggtgatttctccattgatctctttgatgaaggatcaggtaggagccctgaatcaggcgggcattcatgcggcatttttaaacagttctcttagcgtggggcagtatgcaaaggccttggcgcatgcccgggaggggcggtacaagattatctatgtggcgccggagagactggagacgcaagggtttctggattttgtgatgtcggaaggcattaagatttctttccttgcggtagatgaggctcactgcgtctcccaatggggacaggatttcaggcctagttacttaaagattctggattttctgaagaaactgccttaccgtccggtgataggagcctatacggcaacggctaccacggacgtgcgggatgatattatggacattttgcagttgcaggacccttctgtgattacgacgggatttgacagagagaatctctactttgctgtcaggaagccggtagataagtataaggaactggtgagctatattcgcaggaaagaaaaagagatgcctggaagcagcggaatcgtctattgtctgaccaggaagaatgtggaggatgtttgctacaatctgagaaaagaaggattttcagttacgagatatcatgcgggcctaagcgatatggaacgcaaggaaaatcaggatgattttatttacgatcgccgacagatcatggtagcgaccaatgcgttcggaatggggattgacaagtcggatgtccgattcgtcatccactataacatgccgaagaatatggagagttattatcaggaagccgggcgtgcggggagagatggagagccgtcggactgcattctgtattatgagcctatggatgtgcgtacgaaccgattctttatcgaaaataatgaggacaatgaagcgctggatgagataacgcgcaggctcgtaaaagaacgggatgaagaacggcttcgccagatgaccttctattgctttacgactggctgcctgcgcaattacatactggattattttggagaggcaagtcctggatattgtggaaactgcttgaattgcataacccagtttgaggacgtggatatcgccagagaggccgcgtccattctcagatgcataaaggcgaatcatatgaactatggagttacggttatcatagatatcgtgcggggagcaggcaatcagaagatactttcaagaggccttgacaggaatccggagtatgggagcctgaaggaggttacggtgccgagacttcgccaaataatccaggagttattgttccgggggtatctggaattatcaaatgacaattatccggtgctgaaagcagcagatgcagcagagcagttgcagcaggaaaaagtgcctctgcttatgaaactggcgaaagaaagagagccggaaagatccgccggaagagggaaagtaagacgcaagaaggccggggcggctgcatccctggaggaaaaggatttggaacttttcgaggcgctgcgcgcattgcgaaaggagattgcggcggaggagaaagtgccgccatacatggtattttccgataaaacactggcgctcatgagtgccgccaagccagagaattcgagcgagattcttacgatcagcggtgtaggcgattataagatggagaagtatggggcgagatttttagaagtaatagcccggaggatataagttatggatttacaatatgcaagggaaacgtttgaacgctatctggaacaatatgatcaaagtgacgataaaataaggcttaagatcgtccatacttatggcgtggtagatgccagccgccagatcacggagcggatgggacttagcccggaggatatagacttagcccagttgatcggcctgcttcatgatattggaagatttgagcagttaaggatattcgacagttttgagccggataccatgaatcatgcaaggtttggcgttcgaatcctgtttgaagaggggctgatccggagatttgtaagagaagataaatgggatgacattattcgaactgctattataaagcacagtgattttaaactgggaggaatcgaagacagccacaaactgttacacgccagaatcattcgggacgcggacaagttggataactgccgagtaaaattggaggatgctatagagaccatgctgcaagtaacggccaaagaggtaggaaagagcgcgatcagtcccgaggttatggagcagttccggaggaaggagtccatacgctcactgacgagaaagacgaagatggattattgggtatcctacctggcatatttttttgatataaactatcaggttacttttgatataattgaggaaaacaattatatagagagattaattgcgaggattccttattcgaatccggagactgcagaacagatgttggagataaaagaaggattaaagcaatatgtaagcgctgccagatgcagcaaacattccaattatttatgaaaatataggaggagagcaggcacagatcctggtggtggaaagtacgcctggtaaaggctcacgaaagtctaagacatttttaagaaagtgtttatagaattccaagatttcccggcgtataataactaccatacacatgaggaggtttttttgtatgtggcggaagtcaagaaatgcagtacaggcagaggaagaagtatacggtcatgaatatgagacacccagaaggccgactacccgttatcagccggattacagagaggggcttaccagccagcaggtaagggagcatacgcaggatggatggacaaatgtggcggtagatcctccatctcagacgaccagggagatcattcatgaaaatgtatttacctatttcaacctgatttttacggtgctggcagtacttctgtgtctggtggggtcgtttaggaaccttacttttctgccggtcatcattattaatacgctgattgggatcattcaggagattcgggctaaaaatacattggagaaactgagcatgttgaatgcgccccgcgccaatgtcgtgcgggatggcaagacgttaaacgtggattcggaggaactggttttggatgatatcgtcctgtttaaagcagggaaccagatctgtgcggatgccatcgtagtagacggggaggttcgggtcaatgaatccctgctgaccggagagtcggacgagattaccaagaagcagggcgaccatctgatgtccggcagtttcgtagttgcaggccagtgctttgccaggctggaatctgtgggagaggattcctatatctccaaactgacgctggaagccaaggcaatgcaaaaaggcgagcagtcagagatgatccgttcgctggacaagctggtcaagtttgtcggcattgctttgataccgatagggatcgtgcttttcgtgcaaggattcttttttaatggcgaaggatttcgcaatagcgtcacatccatggttgcggcagtcattggcatgattcccgagggactctatctgctggccagcgtagccctggcggtaagcgcaatgcggcttgcgcataaaaaggtgctcctccatgatatgaagagtatcgagacccttgccagggtggatgtattgtgcgtagacaagacgggcaccatcacagagaattctatgagtgtaaacaaactggtgcctacagaagaatatgacaaggaaaatatgccggagttatccaaactggtgggcgattttgtaaaggccatgagcagcgacaacagcaccatggaagccatgaaggaatatttcaaggaaggcactggcgcagtgccggccaaggtggcgccatttacatccgctgcgaagtatagcggagttgcttttgaagagaaggcatacgtccttggagcgcccgagttcgtgctgcgggaggattatgatacctatcgcacggagattcttacctatgccaagagaggctaccgggtgctggtatttggaagttatgccggtgttttggatggaaagaaattgacagagaaggtcacgcctcttggctatgtgcttctttccaacccaatccgcaaggaggccccggagaccttccaatatttcgctgagcaaggcgtggaggtcaaggttatttccggggataatccgctaaccgtatctgaagtagccaaagaagcggggatcaagaatgcggaagagtatgtagatgcggcaactcttgagacggaagaggatgtaaagaatgcaatcgcaaagtatacggtattcggccgtgtgactccgggacagaagcggcagttcgtgcaggctttaaaagagcagggaaagacggttgccatgaccggagacggggtgaacgacgtattagccctgaaggatgcggactgcagcgtggccatggcatcgggaagcgatgcggccgtccaggcgtctcaggtagtgcttctggagtcggattttgcatgcatgccatccgtggtgctggaaggaagaagggtggtcaacaacatccagcgttctgccagcctgttcctggtgaagaatattttttccttcctgctgtccttattctcagtggcatttatgatcacttatccgctggagccttcgcagatatcgctgatcagcatgtttacgatcggcataccggcgttcttcctggcgctgcagccgaataaggaagtcatcaaaggacattttcttaccaatgtatttttaaaagcgctgcctgcagggctaacggatgtgctggcggttggggcgctggtcgtattcggacagaccttcggggtgggcgccaaggacatttccacggcagccaccatgcttcttgccatcgtgggattcatgatcttgtacaaaatatgccagccgctgaatacgatccgtgttatagtttgggcaggctctattattggccttctggcatgcagcatattccttccggatttatttgcgattacagggatgtccagcaaatgcatcatgctgttcatcgtattctccatcgccacggaaccggttcttagatatctgacgctgctggttggcggattgaaaggcttgcataagaaggtctttcacaaagcgtgatagaaggcgggtgtgtcgcaaggaggcggataccagccctacgtggttccggacagatgcaggctgtggatggatctgaaaaggcagcgcctagtgctgtccataccatccgttctttcttaaaggagcatccggagatagaagaagtccagatggtatgttttgatgagattacaaaaagatattatgaaaacgcgctagatggataagaggtttccatccagatctttccacaggaactcgccgtcataggtcatatagccgcaggcggagttttcttttggaatggagatagagccgggattcatataagtataagttcccatattccgattggccggtacgtgggtatgaccattgagcagaatgtccccttccttcagcatcggaaggctttggggattaaagtggtggccatgggacgcaaaaatgctacacccgttaagttcaagaaagcaatagtccgccaggataggaaactccaggaccatctggtcaacttccgtatcgcagtttcctctgacgcacaggatttcctgcttcatgggattcaaaaggctgatcacttccttaggattatattcctttggcaagtcgttcctggggccatggtagaggatgtcgccgagcagaagcagccggtcagcctgctcgcgttcataggcagccagcattttccggcaataataggcagaaccgtgaatatcagatgcaatcattaatttcatatatatttacctcgctttatacggattatgagggaattgtagcataaaattggtgcagagtaaaattcatttttcatacgttcagggttatgttatactggtaacggaggtgaactatgctgatttcccttaccataatagcaatcgtaatcggatggaatttttaagataccgtttgacgactttgagttcgtggagcaggtatgtacagttgccttgatatttatcatgttttatggaggattcggaacgaattggaaggaagcaaagcctgtcgcccactgttgccatcataaaacttggcggccagacatttgtaccggtgggagataccaggatactggaaggcgatatgcttttaaccattgaagatatgccgcgaaaggagaggggaagatgaaccaaaagattgaaatctgttatgcaatagaagatgatgtcccggatattatgtctataatggatatagcctgccaattagccagggatgcgtcctggtatagcgcggatgatgaaaactatgtcagaaagcatcttcatgagaacgggtttatattgaaggcaaaggcagatggctgcctggctggatttctcatcgtccgctttcccaaagacgcaggtgataacttgggcagttacgtacgccttacgaaagagcagaggcagtatgtggcacacatggagtccgttgcagtaagcccggattaccggggaaataaactgcagagatgcctgatggcagaaggagaaaagaatcttaaggatacgcagtacaagtatcttatgggaacagcgcacccggaaaacatttatagcgtgaataattttcttcagctggactatgagatagtagccgaagataataagtatggcggccggcccggatatgtgttcttcaagaagatagaaaaataagaaaagcgctgttactcaaggtacagcgcttttaatgtatcagccagggattcagaaagtccgatcctgtcttttagaaattgccggatgctgccggaggtttcttccataatctgaaagactctctttatgtaattttccttgacgcccatacagattcgaaggctttcaatttgaccgggatcggtaatggctgcggacagtcttttgagtatcagttctacctcatcttttagaaaggcagcggtcatcatataatcatcaataatagtatccatatctacatccagggtatacagcagcatggcagtccccatgcctacgcggtcctttcctgcgctgcagagccacagcgtggccccttcttcctgcccggctagaatacggaaaaactgtgcatactgcttcagggaataatcgctggtgatgatatcttcatataatttctgcatatagaatgacgggtctacgccatgctccttcatagccagcgtggcttcctccaaagtcattttttcggatgtatcatcgtgggttatgccggcagtcatagtctgcaggatgggattgctgatgtgcgtagcaccttctatatgaggatcaggcttctcggcctgttcatccaaagtccgaaagtctacgatggactttaagccgtattcatctgagagcacctttttgtcgttctccgtcatgtggtagagctgcccgctgcgtatcagccgccgtggacggacgcggtatccgtccatggtctctattcctcccaggtccctggtattaaaaagaccctcaagtgggattcgttgtataggattcataataagcctgcctttccaaatgatatttctaattattacgttacttttcagtatagcatatttcatgctataatggacaaatgaatatcttaagagacaaaagaggagatgttatggggaaatatattcgcaaaattatggttgcgctgctgtatgtagccacctttggcataagcgtggcaatctttgtcagcaattatctgtgcaaattcatgctgggatcaagaaagcatttgagaaaggcgaaagaaaaggatctgctgacccggaaacaggaacagaaccggctcttcatgagcgccaatggaatagacgcgtacataaccagctgggatggcctggaacttcacgctctggagattccggcaaaggaagagagccataagtatgtcattatctgccatggctacaagagcaatgcgcttaatatgggaggcgatgcgatccgcttccgggaggcgggctaccatatcctggcgccggatgccagggggcttggcgagagcgagggaaactacatcggaatgggctggcccgaacgccgggacgtagtggactgggcaagacggatcattcaggaagatggacaggcgaggatcctgctgttcggcctttccatgggagcggcaaccgtcatgatggcggctggagaggaagaccttccgaatcaggtcaaggcagtcgtagaagactgcggctatacttccgtatgggaagaattccaggtgcagatccgtaagatgtgccatcttccggcatttccattcctctatatagcatcggcgatcatgaagagaaggggcggctatgattttaaggaggccagcgcccttgcgcaggtggcaagatcaaaggtcccgatcctgttcattcacggaagcgaggatctgtttgttccctatgagatgcacgggcgtctatttgaggctgcaaggtgcgagaaggaaaggtttgtcgttggcggcgccgcccatggggaggccagtattatcgacgaagacagatattgggagcgcgtgataagttttgcggacaaatatacgtcatagatgggagaatatgttatactggatatataaaaataattaagggggtattcttatgacagaagaattgattagagaagttaagcatatccaaaaatgccttgtaaacaaggaaatgacgggtgaggaatgggaagagaagatggcggctgtcaataagctggaagaagtatcggactatctgaaggatgcccttggacggggaattgagttttaaaaaggaatttgaacaggatgattgatggaagggtaattgaaggaattgtatttgacatggatggactgctgttcgattcggagcgtatcgttcagcggtcctgggaggatgccgggaacgagcttggcatccggcatatgggaagccatatctaccatacgctggggatgaatgtggtaggaaggaatgagtacttcctgcgggtattcgggcctgattttcccgcggaagagtttgctggcaggacgagagtccgattccgggagattgtagaggaagaaggccttccaatcaagccgggcgtattggaacttctggaatatgggaagagcagaggctataagatgtctgtggctacgtcatccagaagcggctatgctatacataatctggaagaagcagggatatacaggtattttgacggggccatattcggagatatggtacacctggcaaagcccgaccctgagatatacttaaaggcatgcgaggccattaagacaaggccggagtgcagcattgcccttgaggatgccccggcgggaatccgctccgcgtatgcggccggcatgattcctgttatgattccggatctggtggagccggatgaagagatcaaagcattggtccacaggcagtttaaaactttgcatgaggtgattggacttctggaacagatggacattggaaaatagcaggaatgacaggcattttgcctttcattcctgctatttaataaacctggctttttattcttctacaatgaatacttctttccccattccgcagatcgggcatacccagtcgtccggaatatcttcgaatggtgtacccggggcgattccgccgtccggatctccgatttcaggatcatatacatatccacatggttcgcataaatatttctgcatgacttcttacctccaattatttttagttattgtcttttttccataatccgtgaagattacagtattcatatgccgcaacaaactcgtccccttccggaagaatgaatacagccttgggatccatacccggcgcaagttttctgtactgcgcgccaagtttagtctcgatatagatgcctgtaatgtaatgctcatccagcatagggtgagtcacggagccgaccgacacctccactacattatcttttatggtaacgacaggaacgtgtttttcctgtgcggcatccgttgtgttcgccttgatttcctcaagtgacggaacagaagcgctctcgctaagagagatcagctcctggaatatattatgtgagttctggtctttatagaatctgcccataaaaaagcctcctttatgttttctattagtttttgctgtttctgttaatagaatacatgaaaaaggaggctatttctgtgacttggttacaaaactatccgttttttaaaattttaccgggattcccatctgccggaggcgccgcatggaagcaccagcccggagcgtgtcaccggaagtccgatctcctgcgaatctacattcccgtcatagttctttagttccgtggccagcatgtaggtgagcacggcaggcgcaaggcccgtagtataggagttgaccagaaaaaacagaggctggtcggacaggatctgcgtgcaaagtctgatcagaggatggatggcatcctcgatcttccagatctcgcctttgggaccccttccgtaggaaggcggatccataatgatggcatcgtaatggttcccccttctgatttcccgctccacgaatttgacacagtcatccaccagccaccggatcggcttgtcggacaggccggaagaagccgcattttccttggcccagtttaccatgcctttggatgcgtctacatgggtgacgctggcgccggcccctgctgctgccaatgtagcgcctccggtataggcaaagagatttaagacctttatcgggcgaccggcctttcgaatcttttctgaaaaccagtcccagtttgcagcctgttccgggaaaagaccggtgtgcttgaaactaaaaggcttcagattaaaggttaagtctttataatgaatctgccattgttctgggaggcttatgaattcccattctccgccgccccttttgctgcggtgatagtgcccgttcctatgcttccatccacggtcatttctgggagtgtcccagatgacctggggatccggtcggacaaggatgtatccgccccagcgctccagtttctctcccttgctgcaatctatcacttcataatctttccattgatctgcaatccacatgattatctattctctcctgtttctgacattataatccacaatcacttaggattatagcatgaaggaatgaaaaagaaaagaagagggttttggaactttacatagatttaacattgagcggatttcagattttacattcatcctttatgatagcaattgtgaagaagatatttgattgataaaggagagaaatgactatgagattgaaaaagtttatcgcagtattggcaattgtaggtatggcagcgggacttgccgtcggctgtggaaaatcagatgctggtgatggaaatgataaaaaggcagaagcatctgaatgggatgcttccagggatatcaccattgtatccagggaagatggatctgggacaagaggggcatttaccgaattgttcgggattgaagatgagatagacggcgagaaagtggatatgactacgcaggaggcccagattaccaatagtacttctgtaatgatgacaaccgttgcaggagatgattatgcgatcggctatgtatcccttggctcgcttaatgatagcgtgaaggccatgaagattgacggggcagaggcaaccgctgagaatattaagagcggcacgtataaggtgtccaggccgttcaatattgcaaccaaggaaggggcagataatgcggtggctgaggatttcatcaacttcatcctaagcgaggaaggacagaaagtagtagcggacaatggatacatttctttagatgaagcaaaaccatatgaaggaagtgcgccggagggaaaagcggtcgttggaggctcgtcttctgtttcacccgtgatggagaaacttatcgaggcgtataaagcggtgaacgacaaggcagaaatcgaacttcagactaccgattctaccaccggcatgacatccgctattgacggaagttatgacattggcatggcatccagagaattgaaggatacagagacgtccgaaggcctggttccccaggtgattgcgacggatggaattgcagtcatcgtaaataagaacaacacgacagatgaactgagcagcgatcaggtaaaatccatttacaccggagagacgcttacatgggatgaggtagtaaaataaaatgaaatcaaaagcatggactgaaaaattcatgcggggagtgttcttcattgccgcctgtacttcggtactggcggtagctctcatttgcttattcctttttgcgaatggcatccccgcaatgaaagaaattggatttggcaagttcctgaccggccagatgtggaggcccaagaaccagatatttggaatctttccgatgattataggaagcttgtatgtcactgcgggggccatactcttcggagtgccggtgggaatcctgacctccgtattcatggctcattattgtccaaagaagatctacaggccgctcaaagcggcgacggaactgctggcaggcattccatcggttgtatatgggttcttcggcctggtcgtgctggtgccatggatcagggagatgggccgggggcttggcttcggaggaaacgggagcagcatccttacggcatctcttctgcttggcatgatgatccttccgacgattatcggcgtgacagagtcggcaatccgtgcggtgcctgcccagtactatgaaggagccgtggctttaggcgccacccacgagagggcgatcttccgggtgatcctgccggcggccaagtccggcgtcgtagcggggatcgtgcttggcatcggccgggcgatcggcgagacgatggcagtcatcatggtggcaggaaaccaggccaggatgccggctggcatcttccgcggaatccggactctgacagccaatattgtgatagaaatgggatatgccacagacctgcacagggaagcgctgattgcaacaggcgtagttctctttgtgttcatcctgctgattaacttcagcgtagcacttctaaacaggaggggaagccatgagtagtagccaggaaagattcaagcagagacttaagtcgtacgccaggacgccgggatcattcatcgtaatgcttctggtcgtactgtctgcggttctgacttttaccgtactgatatttctgatcgtctatattttgattcacgggattccgtatatcaagccatctttattttctctgacctatacgtcggaaaacgcgtcgctgatgccggcactgatcaataccattgccatgacgtttttgtctctggtgatcgcagtgccttttggcatattttccgccattttcctggtggaatatgccggacggggcaacagatttattgaaatcatacgtctgactacggagaccctatcaggcatcccgtccatcgtctatggattgtttggcatgctgttctttgtgactgcatgcggatggggattctcgatgctggctggcgcatttaccctgtctatcatgatcctgccgctgatcatgcgaaccacggaggaggcccttaagtcggtgccggattccttccgggagggaagttttggcctgggcgcgggaaaactgcggacggtgtttcgaatcgttcttccatccgcggtgccaggcattctcgccgggataatcctggcggtgggaaggattgtgggagagacggcagccctgatctacacggcgggtacggtggccgatgtgccaaacggcgtcatgggatcgggccggactctggccgtacatatgtataatctggcgagcgaaggactgtacatggatcaggcgtatgccacagcggtcatactgctgcttctggtagtgggaatcaacactttgtccggcgttgtggccagaagattaacgaaagcgtagagaggaagaatcatggggaaaattagtattaagaatctggatttatattatgatgatttcaaggcgttaaaagatgtgaatctggaaatagaaacgaataaaatcacagcgtttatcgggccttcaggatgtggaaagtctacccttttaaagtccatcaaccgcatgaatgatctggtggaaggatgcaggatagaaggggatattcttttggatgggcaggatatatttaaggagattgatgtaaacctgttaaggaagcgggtgggcatggtgtttcagaagcccaatccatttccgatgagcatctatgacaatatcgcttatgggccaaggacccatggaatccgttccaagtcccggctggatgatattgtggagaaatccttaagagacgcggcaatctgggaagaatgcaaggaccggcttaagaaaagcgcccttggaatgtcaggcgggcagcagcagaggctgtgcatagccagagctctggccgtgcagccggaagtccttttgatggatgagcccacgtctgctctggatcccatatctacatcgaagattgaagaccttgcgatggaattgaaaaaagattatactattataatggtaacgcataatatgcagcaggcggtccgcgtgtccgacaatacggctttctttttgcttggcgaggttgtggagtacaatgatacggagaaacttttttccataccatcagataagcgtacggaagactatattacagggaggttcggttaggatgcggaataagtttgatatgcagttagagcgcctcaatgagcagctgacttatatgggagaattgtgcgagattgccattaacaaggcgaccaaggcgcttcaaaatggagacatggagcaggcaaaggcggttcgggaggcggatgatgagattgaccagatggaaaaggacattgaacgtctgtgcctgaaactgctgcttcagcagcagccggtggcaagagatctgcggcagatatccgcggcgcttaagatgattacggatatggagcggatcggggaccaggcgtctgatatcgctgagatcattatctctgccaggatgacggaggcgatggacatctcgagaatcgggcagatgtcggaggcagcggcaaagatggtacgtgacagcgtcacggcctatgtaaagaaggatctggaactatccagagaagtgatggcttccgatgacatcgtggatgagatgtttgaagaaaataagagagaacttgtcagttttattgcggaaaataagggcggatatggggagcgggcgatcgacttgatcatggttgccaaatatctggaaagaatcgccgatcatgccaccaatattgctgagtgggtggaattctccatcactggagtacacaagggaatggaaacaatgaagctaaaggagaattagcatgatattttgcgtggaagatgacagcaacatacgcgaactggtcgtatatacactggaaagcaccgggcttaaggcgcggggatttgaggagggaagttcctttctggaagcgctggcgctggaaacgccagatcttgtcctgctcgacatcatgcttccgggagaagacggcatggaactgctgaaaaaactgaaggcctcgcctaagacgagggatattccggtcatcatggttaccgccaaaggcgcggaatatgataaggtcatgggacttgacaccggagcggacgactatgtgactaagccattcggaatgatggaactggtatccagaatcaaggccgtcctaaggcgaagcgccagagaaggagtccggaaggaagactccatcgtgattggcgagatagagatgaatctgaaaaagcatgaggtgacggcagcaggggaagtcataagcctgacgctcaaggagtatgagcttctgaagcgtcttatgaagaattccaacattgtgctgaccagagaccagctgctggaagatatctggggctatgactttgacggagagaccagaaccgtggatgtgcatgtcaggactctgcgccagaagttagggagcgcgggggagcggattgagacggtccgcggcgttggatatcggatgagagaataacttgcttgaagggacaggaatcagtaatgagaagaaagatacagcgaagcatgatactggtaatcaccaccaccttgctgattacctatgcgatcaccacattcgtggtgtatcgccagacgatcagccttatggaagatgagatccgccaggaggctgactatatctgcgcagccgtcggaatctccggcgaggcatacctgaaagagatggacgcggtgcgaaagaacaccagggttaccatgatagacaggcagggcaaggtgacctatgattccaaagaagacgaagtgactttggaaaaccataaaagcaggccggaggtcaaagaagcgcttagtaccggaagcggccaggatatccgcaagtccgataccctgggacaggagatgttctattatgctcagaggcttgcggacggcaacgtcttaagagtttctaaaacggttgatacggcattctttacggcaataagaatcctgccggcaatgggcgtgatagccgtgatgatgcttttaatcgcatggattctggcaagatggcaggtagcaagactgatccggccgattaatgaactggatcttgataacccgatggaaaatgatgtgtatgaagaattgacgccactgcttatgagcatagacagacagaacaaggaaaaagacgcgatcgccaatatgagaaaggaattctcggccaacgtttcccacgaattaaagactccgctgacctccatatcaggctatgcggagattatgaaggacggcctggtaaagccggaggatatgaagaagttctcagagcgtatttataatgaagccagcaggctcattaccctggtagaggatatcattaaactgtcccggctggatgaaggaaaggtagaactggaaaaagaggaagtggatctctatcagcttgcaagggaggtatgcagccggctggctccccaggcgaatgcaagagacatccgtatagaggttaccggggaatccgtggtttaccggggaatccgtcagatcttggatgagatggtatataatatctgcgagaatgcaatcaagtataataaggacggcggtaccttaagtgtctgggtaggcagcacgctgaaaggaaagaagataatcgtgacagacaccggcattgggattccggcggatcagcaggagagaatctttgagcggttctacagggtggacaagagccactccaaagaaagcgggggaaccggccttggcctgtctatcgtaaagcacggggcgatgatccatgacgcggatatccgggtggaaagcgaagtgggaaaaggcaccagaatggaacttacattctgatgcctgcaataaatgcaatggcttttatgatgtcctccttcaactgccgatcatccagctgtacccgatcggtatcgtgcagtccctgatggcagcgggtcttttgattgcaggaggccttaagccgctgcagattatctctatagcggcagcgttcccatttatatttatcatgctctttgcctgcgtatctctggtaaaagcgctgaagaccgagaatgtatcataagaaatagtctggaaagtggcgtcttgacgtgtcaaggcgccactttcatttatgctctgttcaccttataatttaagcagcgaggtgtgagcatggaaggaatcttgaattgtacgatacccggaatcaaaatatgcatattgtggaggcagattgcaggaagcgctctgcttgcagcggtattggcatgcctgtatatctttgcatggttccagagcacggcatatgacagcctgccgcaaggacggtctgccagtcccgtgatgaacggacagacgggtagagtcgtaagcgggatgtttccggaaattgcattgggaattacaaaacaaacggtagtgctgtctcttgatgagaggaaagaagaggcgagaatattcccggaagtgaatcagaaaaagaaagaggacctgaatgttcaggttatgacatcttcggactcccatccggcggagacgccgttgatagttgtctgcctatatggaaacggaggaatgccagagaagaccatatattcctgcgaaagtactaatatagaagtagatgcttttcaaagacccagaaggcttggcaaagaatttaccggctggtatctggacccggcatgtaccatgccctttacaggtgtggaaggaaccccggtgaatttggcgttatatgcaggatggaaggaattcgacggctttgtgtccgatgagaacggacggatcattggatgtacaagcccatcggttgccactgacggcatcctgacatttccaagaagcatggattgtacaggaattgaaaggaattccctgggagggctggaagaagaggtgattgaggtctacattccttccaacatcacctatattgcgccgggagcctttgatcacctccatctcctgatgttcatcgaggtggctgaggataatccggcttattacagcgaggatggaattctgtatgcggcagatggagagatcattgcatatcctggcggaaggtaggcttttgcctgttgcaaagaatcctgggaaatattataatctaggaaaatgacatttttgtatgatgatgcataagtataaatggagtgtggacatggggaagatattattgctggaagatgatgaaagcctgaatcggggaataagcctgaaacttaaaaaagaagggtacgaagttttaagcgccaccggagtgccggaggcgaaggagatgttccgggaaaatgaggtagacctgatcatcagcgatatttccatggaagatgggaatgggctggaatttggacaaagcgtgcgcaaggtcagcgatgtatacctgatcttccttacggcgctggatcaggaagtcgatattgtaaatggatatgatgcgggggcagatgactacatcaccaagcctttcagcctgatggtgctgatatccaaggtcaatgcgctgatgcgcaggattgaaagtacgcacgaagagggaaatgtgctgacatccggaagcatgcaagtgtggtgcaaggagatgaaagtatttcagaaggaacaggaactttctcttagcaagaaggagatccagctgctgctttattttctggagcatccgaagcagattatctcgaaggagcagatattagaatcgatatgggatatggacgggcagtttgtagatgacaatacggtgcctgtaaccatcagcaggctgaaaaagaaacttgcgacagaagaagactatgaatatatcaagaatataagggggattggctacctgtggacgacagaagtattgaaaaaatgataaagagccgggaacagggatatatctggctggagcaggagttgaagatgaaacttggcataagtactgcattcattgcagtatttttctttgtaatacgctgccttgaacagaatttccgttattggctgccctttcttgtgggcgcgcttgtaacgaacggtatatggaattattttttgtataagcgggaatacggcaattacctgtccatcagtcgatatctgaatgcgtttgaggaaggagattatgattttcatacagaagaagattatatgaaaagtgggattcattcccagattacagagcatctggaacggctcggaagcgcatttggaacacttcggaaccgcctggtggaggagaaggagaatacaaaggcgctaatcacagatatttcccatcagctgaagacgccgattgccgcccttggcttgagttttgaactggtgaaggatgaagatatcacagcggcggagaagatggaattcctggagcgcgcagagcaggaagtggggaaattaaactatcttctggggacgcttttgaacctgtcaaggctggagacagacatgataaggcttgagcctaaagaggccagccttaaggaaacgctggtccgggcagtcaatggcatctttatcaaagcaaatgaaaaaaatatagagatagaaatggaaggttttaaggatgtgagcctacagcatgatccaagatggacagcggaagcatttgccaatgttatggataacgctgtaaagtattcgccggaaaaatctagaatacagatacgtgttgaacgggaggtatcctatgtactgatcgagatcgaggatgaaggaatcggaataccaaaagaagaatattccaatatattcaagcgattctaccgcggcaagtctccagaagtggaggccatggagggggcaggcgtcggcctgtatctggtacgcgagatcatggaagcgcagggaggcagcgtgcgcgccctcccttcccacaggggaggaaccatattccagatgatgctgccgaaaaagaagtattctctagaataacaaaactgttattttatctgatatgttcctgtaagactcctttggtaggatagatacagacaaagaaagaatgcccggtcgggtgttaagaaaggggttcaattatgagagcaatattagagactgtagatctggtaaaatattatggagatggagacaacatggttaaggccatcgaccatacagatatatccgtggagcgtggagaattcgtcgcggtggtgggccgctcaggctcaggcaagagcacgctgcttcatatgctggggggacttgaccgacccgacagcggcaaggtattcattgaaggaagggatatattcgggctgaaggatgagcagctggccatattcaggagaagaaagatcggattcatctttcaggattataatctgatgcctgcattgaatgtatgggaaaacattgtgcttccgattggattggacggaaaaagagtgaataaggattatgtgatgggcattgtaaagagcattggcatggaggaccgtctgactgccactccaagcatgctgtcaggcgggcagaagcagcgcgtagcgatcgcaagggcaatcgcctcaaggccggcgatcattcttgcggatgagcctactggcaatctggactccaagacagagatggaagtcatctcaatcctcaagaactgcgtttccaagtatgggcagaccctggtcatgattacccacgacgagaccattgcccagatggcagaccgcattatcattattgaagatggtaaggtggtgaaataaaatgaatattattacgaagaccgcaacatcgaacttgaaaagaaataaaagcaggaatattctgatcggaattgcgatccttctgacgacgctgcttcttacgatcgtgccgacggttgtctttgatgctatagatatggaattcgtagcagtaaataaggcttatcctacctttcacgcaatgtttcggaatgtagatgaaaagtctgccgaagagatgcaaaaggatgaaagaattacgaaagtaggcttaagggaggaccctgcctacatggtgtgtagcaatccggatgtaaatatcagcatggtatactgtgatgccaatgccgccaagttaaaccggctgaagcttaaggaaggagatttgccggaaaaggcagatgaaatcgtcgtgtccaggcacctcctcaaggctatggggctggaaggagagattggcgatagaattacggtgccgtttcaagcagtagaagacggcgggcttgggatggaacaggtcaaggaatttaccattaccggttttagcaaggattccaaagcgacgattgaaaaagggatatattctgccatggtttctaaagcatttacagaagaaatcattcccgagggagcccacaagtaccgggtatattttcggatcgccggaccagagcgcatgacgacggatgcgatcgaagcgcagattaaagagattggagaggaatataagctgaatgccactgacatcgtagataatggagagtatctcaacgccaattatgtggacccggcaatgtacagcggtatggcagggctgatggttataatcgtcctggcgggcatcattacgatctacagcatctattacgtgtccatgatgaacaaggtacaggaatatggaaagttaagagcgattggcgcgacaaaacgccagataaggaaactggtcttccgggaagggttcgcagtggctctgatcgcaatccctattggtttggcacttggatcgctggcaagcatacttatcgtccatgggatgcttgataccagtacgggcgtgagcaattccctggcgaagtatatgagggaagctgtggagtcatcagaagtagcgctgatcaagccgtggatacttcttctggcagccgtggtatctctggcagccgtatatctgtctctggtgcgcccgatgcaggtggcgagcaaaatatcagcaattgaggcaatccgctatcagggccagggaagcaagaagaaaaaggcaaaagaaagaaaaggctatcaggaactgaataccaggaagttaacgatgtccaatctgggtaggaataagagccgtaccgtgattaccatagtgactcttggcattaccggcatcttctttatggtggtagcgaccgtgctaagctgcatgactccagaatccatgaccacccaggacatccgtggagacgtgtccatttccatagatttcgagagcggaaaccagatgcatccggaaagagaattgtataagatacagcagaataatccgctgtcggaagagttaaaagaacagatactggcaattgatggagtaaaagagatcgaagtgcagacaacggctcaggcagcaatccaggaagtgctggaagaaggaaagccaatggagacttttccgacaggcatcgaggatggcgcgcttgaggaattgaagaagtatgtggtagagggaagccttgacgatgcgaaattaaaggatggaaaaggaattatccttaattcgaatggctttctactatcccaaagtggaaaaggattcaatatcggagacaaggtgcatctggatatcaaggatggagaagactctgtcagcagggaattcgagattgtcgcgattactaagcacgcgccatattcgctggcgggctacgatatttctctgccaagttcggcgcttcaggaactttgtaaaaacaatctgacagacagatataacattatggcagaaaaaggaaaagcagccagtgttaccaaagcggtagaggcgctggtagaaaatcaggaatttctggatattgatacttatcaggaattatataagcaggcggagacgcagattggcttcatgatgtatggatgctacggactgctgttcgtattcgggctgatcggcatcctgaaccttgtaaataccatgatcaacagcgtctatgtcaggcggagagaacttggcatgctgcaggccatcggcctgtcagggaaacagactgtgaacatgctgcagctggagggcctgttctatacggcgggcacgctggtactgtcccttggcctgggcagccttctgggatatctggccttcctttgggcaagggaagaagggataatgtccatccggacctatcactatccggcagggccggcaattatactggtagtggtggtactgcttgtgcagctgctgattacctatttggtaaatctgaactttaagaaatcaagcttgattgagagaatcaggtttgcagaataaaggataggaaggaaagggatgaatcctcttggagggcttcatccctttctttatttacaatttaggataatcgtaaaagattaagaatggtatcacgtacctgtcgcgcctgaggggagaggctataatcttttgcggatataagagctagttcccagtgcgcctcttctgacggaagcgggactacttcctgatccggacagacttgcatcatattttctaccataactgccgtatcatagatcatcggttcaaagccgtggaggcggcaatttctttgcggtatctttggaatcgtccttactctggcaggccgccaaagatagcgtcagtaccgcaatcatcagcacggcgatcagtttctttttcatagatatttttcctttctttccttaaggtggggcttgctaagaccatgataattatatatggaaaaatgatgaaagtatatgggggcctttgtaatgacatattattccataatattacagtttagaattcggcataccgaattcctgagttgacgcaatacattataaagaatgtaattgcaatatgaagttcgaacttcagaattaatggaggcaccttgaaaatagaataataagactggacgaagcgtctttcagtacataaaaagcatctattctggcatactaattccggggtgatagtatggataaaaagcagcaggagaaacagaaccggcagaagaatctggatcaatacaacagtgtgaccgagaaggtaaagccggagaatcaaaaccaggagcataacgcaagaaaagaagcagtagatgtgaaaatgagacaggtataagactggaacaaagcaaagaaaggcatccgcaatgggtgcctttctttgcttttgatattcaaaaatagtagtatgtgttgttcttaacgtacaagtctatcataagccattttttgtccatttccttgtacttttctgccataaatggctttgtaaccaatttgtgatttggaagccaagtttcaaacagatatttatttgcttgatttaaagcagtagagacaaggtacatcgattcccgtactttctccaacaggaatttgttcagcaacatttactggtttttcaaaaccaaaatatgtttcagttgtccttaatgtttttctttgaatttctaaaacaatatcgcctacaatcaatgggacattttcatcaatcatgacataacgtgaagaaagtttcggcttatcaaatgtatttaacattggaatactctttctatattcatcaggtgatgatttcttgactaatcttttaaacaagtgttgataatagaatgtagagagacaagcgatttttgccaatttctctgtttcaattttctcattcaaatgctgttcaatataatttaatgacatctcaatagtttcatatgcgtacatatctgtacctcctaatataattcatagttaaagtatatataaaaaatttttattcggcttgtcgcacaatgctaatttattcagtaattaagaaaaacacttggataatacgttttatattttcccttgcaaatccacctactgtttaatattatcctataatcttccggttactatctttatgtcgtagaaataataaagaaaaggattttttaatgcaactctttacttttggctggtaagtgttatactaatttcatggggtattagcgcagttgggagcgcgcaacattcgcattgttgaggtcacgggttcgaatcccgtatactccattttttattttctttcataaatccgcaaatcccgtattttcaagggactgcggattttaaagttatagggtatatttctttttaactaagaaaacatacccacgtgcaacacgaaatagtatagagactttgccgaaacttcctaagggcatgaagccgcggcatgtccatgtaatggatgtaatcggagaaatggaggagcgagggcggctatggcagaggagaataaaaaggaagcatcatttacacaaggttctatctttggcttaattgtaagatttgccctgccagtgctggtggtccttgtgctgcaggcagcctacggcgccgtagacttactggtagtcgggcaatttggggatgttgccagcatatcggggagaagagacctaaggctgccggagacgcggtagggacgacaatcgtactgtttttcatcattggcattacgcttaccgtgattttagaaatctttgcgggaaatatcgccgagatcatgagaagaagaaaacagaagaaaacagcctgaaaagatgtattgacatgaggtgttccatagtttataattgagacaaatttttagacagaggtagtttatgttaattgtagggagagtcttatagacaacgaattgaagagttgagaagaggtaactataggttagagatatagttatgttctttttgtctgccttacaagatgctaacatacacttctgacagagaacggtaaatggaatgataaagcatggctgtatggtcatgctttttttatcctattttgtagaattctatttaagataactctgtccgataacgccacagaagcggtatgcccatacaaaggcagaagtttttgtggcgtttataaatatatgattcgaatggagagattgaaatgacagatacggaaaagatattagaatttgaccggataaaggaaaaactggcagaattggcatgcacagaaaaagccagactgcagatacaggagctgaagcccagcttaagcgagttggaggtaaaggcctttcagagggagactacggaagccagaaaaatgatagaaatctgcggaaatccgccggtcacggcactacagggagttgacgaatggatagaatttgcgtccaaaggcggctgtctgactccccggcagctggaacagatatccatggtactggctgcggtaaggcggctgaaggactatttgcgcaggggaaaggagcatgagataggcctggcttattatgaggagaatctggacggactcgatgacattcgagaggaattgggcagcaagatcaggaacgaaagggtggacgattatgcgtccaaaacgcttaagtcgctgcgggaagcgatcgatcgggcggaaacaaagatgcatgaaaaggcagacgctatcctgaaggcaaataagcagtatatggcagataatttcagcacgttaagaaatgggcgcatctgcgtaccagtgaaaaaggaatacaaattcaagatccaaggcgccgtcatagataaatcgtccacagggagcacgctgtttatggagcctttgcaggttgccagactttacgatgaagtgcaggaattgaagattgacgaagaaaatgaggaaatccgcattctgtacacgctgtcttccatcctgtcggataaggaagagataatccggtcaaacagccgaaccgtagaaaaactggactttatctttgcaaagggtaagctaagtctggaacaggaggggattcagccggagataaatacggacagacatatccggatcaagaatggaagacatcctctgatggataaggcagtgaacataccattgaactttgagatcggaaatgggatcaatggggtgatcattaccggtcctaacacagggggcaagacggtggcgattaagaccgtggccctcaattgcatgatggcccagtgcggccttcacgtaccctgcgaggaggcggagatctgcatgaataatgcgattctgtgcgacataggggatgggcagaacctctctgaaaatctgtccacattctcggctcacatcacgaatgtcctggacattctcaaaaaggcaggaagagatagcctggttgttatggacgaactgggatcagggacggatccggcagaaggcatggggattgccatagccatcttggaagaattgaagaagagcaaagcattatttctggctaccacgcattatccggaggtaaaagagtatgcccgcagaacagaagggatcatcaatgccagaatgacctttgataaggaaagcctgaggcctctttatcaactggttatcggagaggctggggagagttgcgccttttatatcgccgggaaactgggaatgccgggatacatgctgagcagggcggcaaaggcggcctatggcagcgagggagaaactaaaatagaaggaatggcaggaaatgaaggattgaagaaatcttcccatccgaagatacagaaaataaagaaggccgtcacgcagaaggaggctaagaagtaccggatcggcgatagcgtgatggtatatccggagaagaagattgggatcatatgcaggatggcggatgaaaaagggatgcttcaggtacagatgaaaaaggaaaagaggtgggtcagccataagcggataaagctgcatgtggcggcggaacagctttatccggaagactatgatttttctattatatttgacagcgtcgaaaaacggaaggcgcagcatgacatgaagcgcaaatacgtggacgccgaattgacatatgaagaataaagtagatctgctgccttggaggcctagaagaagggatattggatgacaaagtcagtgaaggaccgtatggctggataatccaacagttccttaagcgtgacgtagtaaatggtacgaaggagtacattttccaaaggaacaatcctgcagtcctccgttttcagagcctgcgcgatagagtttgaggcaaatcctatagccaggttctggctggccagctgcatgacgatatcagactggcttgtctcgcaaagtatgcggggcgcaatataatgctgatcgaagacctgctccagttccttgcgaaatgcagactcttttgcaggcataatgatattttccgactgcaaatcctgcatggaaataaatggccgggcagatagaggattctgccgggaaacaatggccacataacggtcatccataatccggtgggaaaataaatcttccttatgctggagcgcagcctcggaactgattacaaacgccgcgttgatagagcgggaatccagcatctgcagcagcgtattgctgccgtctacggtcagcgaataggagatgccaggataaatgcggtgataatccgtaagtatatgagaaagattcagatagctggctacccataaaagccctatgcggagcgttccattctgaagctggctgtgcttctgcatcaggtccgataattgatcggcttcatttacgatacgccgggcagactttagaaactgctctccggcatccgtcagggtgacggatttggggtggcgcacgaacagggcaatgccaagttctttctccagattgatgatctgctgggacagagatggctgcgcgaggaataatttcttcgcggcggcagaaaaacttttattttcagcaactgcaaggacgtagcgtaattggtggatttgcataataaatctcccctcatgaaagtgaatggcgtgcaggattgggcattcctacgaaaattgaaatacctataggattaaactatcgactatataatatatgaatattttacaaatagcaagcggacagatatgataaacctatcaaaaataaaagacttgaaggatgagaggagaagaaagaacatgggaaaaagagatacaaaagcaaatgtattcttaatactggctcttgcagttatcatagggtcaaggctgatgccgggaataggaggattgtcggcggatgcgatggcagtgctgggagtattcttcggatcattgattatgtggatcgggatatccattgactggccaagcatgatcacgctgctggcgcttggaatcatacctgtatttggattttccggcacctttgccggagcctttggcaatacgacggtggcgttcttgatattcacgttcatgctggtatatccgttgtcaaagacaaattttgtaagaagatgtacgatatcatttattacgaataaaattgcgcgcaagggtccgtggtattttatctgcttcttgttagcggcagtgacatttatgggattattcatttccccttccgtgctgtttgtagcgttcatgccattcctggaagacattttccaggttttggagttaaagaaaggcggaaaggcagccaatgtaatcatgatgggaacggcattctgcataagcctgtcctcaggcatgactgccatcgggcacgtatggccgactatggccattggctactatacggcagcgacaggaaatgacgtgaaccagttccagtatatggcaatggggattcctacgggaatcattctgatcatacttctgattctggtatttaagtttctctatcgcccggatgatgtaggggagatacggccggaaaaggcaatgaatcttcgggggactgtgcctgcggctgaccggaaggaaaagattattctgggagtcatgtttctgaccgtcttgctttgggttgcgccaagcctgatcaagggaattctgccggaagtatatacgatggtaaacagctggtcaacggcaatgcctccgctattgggctgcgtactgctctttatcttccaggttgacggggaacggattatgaacttccgggaagttgccagcaaaggcgtattatggggcagcgtactgatgaccgcggcagccacccagttaggcgcgtgcctgaccaatgagaacattggcatcagtacatggctgactggtacgcttgagccgctgaccaaaagcctgcccgtgatcggactgatcctattcttcatgacatgggcggttgtagaaacgaatttttcatccaatattgttacgacgacggttgtcagcgcggtcgcgttatcggtactgaccgcgttgccagaaggctctgtcaatgttggggcggtagtgtgcatggtaggatttgcggcaggaatctgcaatatgactccggcagggcagagcacagtcaatacggttgccattggctcaggatggacggatacaaaatccatgtttgtctggggcggcgtatttgcggtaatggcgattctggtgttgagttttatcgcatatccgttgggagcgctcgtaatctaggaaacgaaaaatagcagggaggaacagtagcgtgagagaatatcagtatgatgttgtggtggcaggcggcggcgcagccggagtggcggctgcagtaggcgccagaaaggcaggagccagaactcttttggtggaaaggaatccctatctcggaggcgaggctacccattccggggtagcggccttttgcggattctatacatgcggcggcaaccctgtgaaggtggtggacggagttggcgggctggttttaaaggagatggagagtctggggccaaccctggattatatcgtatctccgaccggcaacaagaatattaatttccagccggaatatctgaaatgcgcgctggataatctggtgaagaaagaagaagtgtcctgcttcttacatacaagaatcatcgcggccaaggcggaagacggacggatatgcgcaatcatctgttccgacgatgaaggcgtattttccgtggaggcctcctgctttgtagatgcgacaggggacgcgaacctggcacatctgtgcggtgcaaaaaccgtgtggggggatgcgcaaggccatgtccaggccgcaacccttccgtttcgcctcagcggcgttgacacgtcctgcgatatgtctcctgccgcagtagaaaaggctattgtgaaggccaagcaggaagggattccgtatttgaccaaagaaaaagggtttattctaaaaaaagagaattccgatacggtagtggtacttctccccagcgttatcccagaaggcttagacgctgaaaaactgactgccatagagcaggatgccagaagacaggtcctctattatgtacaggctttacgaaagtatatgcctggaatggagaattgcgagttagcggtaatagggccggcggtaggctatcgggagaccagaagaatggccggaaaggatcagatagccacggaagacgtcctaagaaggcgtaagcgcgaggacggcgtggcaagaggaggctggaagccggagatccacaaggatgtcaacaagatggcagattatatagaagtaaaagaaggaagttactttgacatcccgatcggcgcgcttcaatcagtaaatattgaaaatctgtatggagccggaagaatcgtatcatcacaggaagaagcgtttgcggcagtgcgcgttatgggcacctgctttgccaccggacatgcggctggcgttggagcggcagtacaggccgggactgggcaggcagatatcgaagagatacgccgggaactaatggaacagaatgcattgatatagacagatggattagggagggaacaatatgacgttagacgagatccgtgtacagatagatgcaatagacacgcagatgaagccattatttgtaaatcgtatggaatgcgcggcacaggtggcggcagcaaaggcgaagacgggaggagacgtattcgtattagaacgcgaactggccattatcgaaaaacgcgcatctgatattgacgctgatatctacaatgaatatgtagcatttcttagacacatgatgagcgtaagcagaagatatcaatatgggattcttacggatatgcaggagagagtccttaaggacgcgcttgaagagtccgggttagacggggccaagcctcatgatcaggtagagatttcatttacctgtaaaaaagaagcaagcgatcttaacctgtttatgaatatgatcagactgaataaggtagagatagacggtatgaatcttacgtcaaaagacgccgttcagacgattgatatgacacttgacggcaatattcatgacggcaatatgaaacgcctgctctgccagattggaaaagaggcagatggattcaaaatccgggatttaaagtagtatcctgccgtatctacgcagcgtaggttgtaagtaaaaaactcctgaattaagataaagacagcgaaagaaaggagcaaatatatgaactacgttgttagagtacgcttgaaatagccagcctaagaccaacagaaacagctaatctcagtccattagaaaaagccattaccgtatggtttcatactctataatggtgttagccaatgcaccatgaaaggagaaacatgaaagaaatcaacaacagtaatgacttgcaatctatcataacacaagcctttgaagaaatgaagtcagaacaggcagacaggttcgacatcaataaaatcaatcttgctgaacttgaacgtcgcactggtctgacaagagcccaattacggcggttaaaaaagaataattttcaggtaataccgcatgcacttaccggaagaaaggctgatactacaatcatttcaggttattccggtgtgatcgatgaccttctgaaaaaaggagtatctaattcagaagttattcttgaaaggatccaggaacaggtgtttattgtaaaatagaattaccgaaagttgcaaacgggaattggagaatgttacatctccaaattggagaaagttgcaaggcattcgctagaagctctcaggaacggtgtagcgcttgagtggcagccaccaattattccgccgatgcggtttatgactgtgttgaggcctggagtatttggattcgaaaaactatgacggtttgatccttgatattatgatgccaaagctggatggcatctccgtactgaaaaaaataagatccgaaggaaattcgattccggtgctgatgcttaccgccaaatccgagatagatgataaggtgctgggattggactgcggtgcgaatgattacttaacgaacccttttaatacaaaagagctattggcacggattcgggcgatgacgcgcagaaaatctgagcagatggattcgaaggtgaaattcggcaatgttgtgttagaccggtccacttttgaactttcctcactctacggaaatttccggttggcaaataaagaatttcaaatgatggaaatgatgatgatgaatccgcacaacgtcatttcagcagaccattttctgggaaaggtttggggatatgacagtgatgtggaaattaatgtggtgtgggtgtatatttcttatttgaggaaaaagttgacggcgcttcatgcagatatacaaataaaagtacagcgaaatgccggctattcattggaggagatgtaatgctgcagaaacttagaattaagtttgtcgcattagcgatgtgcgtactgtttattgtacttgcaatcattatcggcacagtaaacctgctgaattaccggcacatagtgacttcttcggacagcactttagaaatcctgatggaaaatgacggcaaatttcccgatgcatttggtatgagaggcaagccttttcgcaggatggaatccgctgaaactccatttgaaacccgtttttttacaatccggctggataaaggagaaaatgttctatatgtggatacgatgaaaattgccgctattacagaagacgatgtggtcagctatgcgaaacaggctctcaattcaaaaaaggacaggggatttatcggcgattatcgatatgcggtacaggaaaaaccaacagaacatttaattgtgtttctggactgcggcaggctgttaaatgcagtaaaatcctttttgatgatcagcgcaggaatctcgcttgcgggatacggtattgttttcgttttcctctatatcttttcagatcgaattgtaaagccgattgctgacggttatgaaaaacaaaagcaatttatcaccaatgtcggacacgaccttaagacgccgcttacaatcatagatgcggatacagatattccggaaatggattatggtgaaaatgaatggtgtcaggatataaaaaaacagacgaaaaggcttaccggactgatacaggaactgatattcctctcgcgcatggaagaaaaagggaatcagttccaaatgattgattttccgatatccgatatcgtaagcgaaacagcacagtcttttgaatctcgtgcgcttacgctggaaaagaatcttgttatacaagtagaaccctttctgtcctattgtggtgacgaaaagtctgttcggcagctggtaacgattctattggacaatgcgttgaaatattctgatgataggggaagtattgtgctttctcttacgaaaacagaacgcattcttcgattgacggtggaaaatacttgtccgccgattgcggcagaagatatgaaatacctttttgaccggttttatcgtacggataagtcaagaaattctcagaccggcggatatggaataggattatctgttgcaaaggccattgtggaagcgcacaaaggcacagtgaaagctataatgggctcataaattaagacactttttgccggatcttaaccgcatatatgataaaatgaaaacaatctcaaggagacgcatcatgagaaaaaatttgatccgcaatataggaatttcagtaggaatatttacacttgctattgcaggaagcaggattctgcagatacttgatgtacagaaatacagtacaacggttttcatttttgcagtctttctgatttctctttgtacagacggctatgtgtacggcgtgctttccgcatttgccggaatgctgatggttaattacgcatttacatatccgcttctccagtgggatttcattgctacagagaatgtgatttcagcgtttattatgatcatcattgctatacttaccggaacgttgaccactaagcttaaggctcatgaagcaataaaagcggagagcgaacgagagcgtatgagagcgaatctgctgcgtgccatttcccatgatcttcgcacaccgcttacgacgatctacggcgcaagttctgccttgcgcgagaaaggggacagcctttcaaaggaacagcaggatacgattcttaagagtatacaggaagattccaagtggctgatcaagatggtggagaatcttctttccattacaagaatcggcgacgggcggattaagatcattaagacgccggtagttctcgatgaactgatcgactcggtcatgacaaaatttaaggcaggatatcctgaccgggatgttcaggttcatgtgccggatgagattattattattccgatggatgcgattttgatcgagcaggtgcttggaaatatattagaaaatgcggttatacatgcaaagggaatgaccagactgtctttgaacgtattttcattaggtaataaagcgatatttgaaatagaagatgacggctgcggtattaaaaaagagcggctgaatcatatattcaaaggagattatgaagtgttggaaagcagttccgacagccgcaagaagaatgcgggaataggattgtcagtctgtgcaacgattgtcaaggcgcacggcggagagatcagcgcgaaaaataaaaagagcggtggtgcggtattccgttttgaactcgagaaggaggaaatgactgatgaagaataacaaatacaagattctccttgtggaagatgacggtaatatcagaaccgtaattgccgcacttctggaaacttcggattatcaggtgatacaggcagagacaggagcgatggcagaaactttgttttcctcttatcagccggatctcatcatactggatctgggacttccggatatggatggaatggaatttatttcttttgtaagaaaagaatcactgacaccggttattgtcctttcggcaagaacgaatgatgatgataaagtgcgggcgctggatgaaggagccaacgattatgtgacaaagcctttcagttcggcagaacttcttgcacgtgtccgtacaacgcttagaaactacagacacagttctatagaaggaaaatttccgggaggaaaattcaaacttcgtaagatggagatagattatgatgcgagacagatatttgtctgtggagaagaaataaaattgtcgcagacggaatataatatcgtggcattactatctgaacactgtggaaaaatgatgacgtactcatctatcataaaggcagtgtggggctattcgaatgaaggcagtacgaagaaactgcaggtgaatatggcaaatatacgaaggaagtttggtgtgaagccgggtgagagctggtacattaccaatgaactgggtgtcggctaccgtatgagctgataacaaaggataataacaacaaaagttgttgttatagataatgcgataggagggaaattatatggtagaaacaattcaaacagttgtacagacgatcaatgcttatctctcagactatattcttgtattcttgctgatcgcagtaggtctttggtacacaatcaaaacggggttcgtgcaggtacgttatcttggagcgggtttaaagaaaatcttcggagaactttctttcaagggtggagatcacggcggcggaatgagttcattccaggcagtagcaacagctatcgcggcacaggtaggtacaggcaatatcgtgggttctgcaggagctatcttaacaggtggtcccggggcaatcttctggatgtgggttatcgcgttcttcggtatggcaacaatctatgcagaagcaacattagctcagaaaacacgtgtagttgacaaagacggcaacattcagggtggtcctgtttactacataacaacagcatttaagggtggcttaggaaaatttcttgcaggattctttgcaattgcaattatccttgcacttggtttcttcggatgtatggtacagtctaactctatcgggtctacgatcagcacagcgtttggagctccgtcatggatcgttggagctgtattagtcatcatctgtgcatttattttcataggcggtgtatcccgcctggcatctgttacggagaaacttgttccgattatggcgctcatattcttacttggcggacttggagtccttgttgtgcgtatcgcttacattccggaaacattcggtttgattttcagatatgcattccagccacaggcaatcatcggtggtggatttggtgcggccattaagatcgctgtcagccagggcgcaaaacgtggtcttttctcgaacgaagcaggtatgggttctacaccacacgcacacgcgcttgctcaggttaagaatcctcatgaacagggtatagttgccatggcgagcgtatttattgatacgtttatcgtattaacattaaatgcattagtaattatctcaacattatatgcaggaaatggtcctttggcaaacggatacacgggagacgtagtaaatacactgaacaatacaaaccttgcgcagacagcatttggttctgtatttggcgagagtatgggcaacatgttcgtagcagtatgcttattcttctttgcattctctacgatccttggatggaatcttttcgcaaaagtgaacgtaatttacctgtttggcaggaaagcacagattccgtttatgctgattgcattagtatttattttcctcggaacaatcgcatcaaactctttagtttgggatctttccgatatgttcaatcagctgatggttatcccgaatgccctggcattatttgctctgacaggtgtagtagtcagcagctacaaaaaggatacaggaagaaaatagtgaataaataagccaatttccgcaggcgggcaaggatgtccaaaaaaatcctttgcccgcctgttttttttgtgtcacagtaaaaataaaccccctgctatgcagggggagggcagatctttagatataagtatgaactcctgtgctagaataaaagtgggtctgcaaaaccacaaataaaacagcacaggaggtcctaagaatggacgtaaatagtttagctcatacaaaatgggaatgcaagtatcatatcgtttttgcaccaaaatatcgccgtcaggtaatctacaaagacataaaggcagataagaattcagaaaacatttgaaatctttttttataagatttaaccatatacacccctgtctatattttaacataaagaaaggaacctgtggtcagattccttttcgttttccttaagtttatgatgttgggctaagccggtgttcttgactgtcttgcccggtaataaattggagatggaaaaagcattgcacaaatacaaaaaagacaaaaaatgttaaaaagttaacataaaatcgttcgtgtaactatgtgcagtaatttaatggattgctatagtaatcgagccgcccattactggacggctccttttatgcccggaagcggtaacccacgccacgtatcgtttcaatatagcgtggtgcttccggcttatcttctattttctttctcaggttcttaaccaatccatagacacggttattcacttctgcttccacatcctcataaatatgctgataaatctgttctttcgtaaatacccgattgggagatgaggcaagataaagaagcaggtcatattcatatttggtaagctccacaaccacatctgctcttgtaactctccgctgaagctggtctacttccagacctcggaatatcaacttttcagagtgtgtaatcttcataaactctatcgtactttcgcaggctagaactgattttatcttattcagaattttctcctcggaatcagaaactgtaagaatcattactttcccaccttatcacctacttttcaaacatatcacgtctatcacttttcttttaagtattgtcatagttaggagcagcagcagataaaaagctttttattttttattatttcctttgatatctcctaaataatacgaaagtataaatccaaacactccaaataagcttgcttcgaacagactattaggattatctataacacaactgctatttaatatactggggataattgacaaaaatagcccgaaaatcacggaataggttatggtataaaaacgattaattaaaaaactcataattgttgatattataaatgcaccaatcacaagaccaatccctgccggaattaaaatctgcatattaaaatcagcaattgaacttacatataattcatataaaccgagtgctgacaatataacggcactatctacccccggtataattgatgaaccagcgactgccacgcctaaaaaaattgattgaaataaattaggatcagtcacaaccgaaaataagtttttattaaacgaaaacaagaaaaatcccaaaatcaaagcaacagcaaccataacatagtttcttttttcaaatccattttttcttactgatttgtaaaaaagcggaaccgttccaattactaatccaaaaaataaatatcttgtttgaaattcataatgttctaataaaaaatctacaactttactaaaaacaagtacaccacatccaaatccaagaacaagcggcataagaaacatactatttcctttaaaatctttaaatagagtgcttatggctttaagagctttttcatataatccaagaatcaaaagcatgacactaccacttaagcctggagctatacctcctattcccacaaccattcctttaaaaaaatcaactaaaaatctcatataaaacgattactcctccattctatcttctttgttatggtcttctttatctttgcttttaccattttctaacctatatccccatattgttgctttatctattacaagaatctctgcccctgcttctgcaagattcattgcaagagccttaccaaatcgtccgagacctataatcccatacgttgttattttattattcttaaacatattttcacctattacccaatcattatatttccttctggatatttgattctttcgcctttcccaaaatgccatacagttgccaccgtcagcggtccaagtctgccaatcagcatgattaaaatcgataacagcttactgtccactcctaatgttcttgtaattccggtagaaagtcctactgttccaaaggcacttgttatctcaaataaaatatccatcagtgccaactgcggctcaaagagcaccattagatatgtccctgttatcaccactccaagtgctaatagaaagattaccgatgcctttcggaacgcatcttttggcagagcgtatttaaaagccttttctgaacaatttgttgatgatgcttttattccctgcaataatacaaaaaatgtacttgtcttgatactgatgatagaatgccacctcctgttgaaccaggaaatgcacctataaacatcaatacaactaaagtaagtaaaccggcatttgaaaatgaacccaaatcataagaagaaaaacctgccgttctcgcagacacactgtggaagaatgcaccgagccatgtaatattttctgtcattcttaaaaacactgttccaacagcgataagcaatatacttacactcagcacaaccttcgtatgcatggaaaacttcttccatttaaatctggtcttacctatttcccaaataaccaaaaaacctataccgcccaaaaatataaatccacttgttacaaggttcagtaatacatcactctgatacggaatcatattctgatagttcccaaggatatcaaaccctgaattgttaaatgcagctacggaatggaaacaactgatgcctatcgcttcaagtagcggataatctctggggaatacaagaaaactgagaacagctcctgttacttcaaataatatcgttacataattacttttcgaatcagtataactaatccttttcctgatcctacatttaaagcttcccgtataagagttctacccttcaggttgattttcttacccattgcaataattacgcctgctccgactgttgtcacaccaagaccaccaaattggatcagcatcgcaaggaagaattgtccgattggcgtaaaggtatctcctgcatctactgcaatcaatccggttacacacacagcacttgttgatgtataaagtgcatctatgtatttcagttccactccgtcctgcacactgatcggcagacttagaagtattgatccgatcagaatcaacaatgcaaatcccagcgtaataatctgtgccggtgttaatctttttatctgtgcagtcattatagtgattcctcctgttcacacattcggtatcctactccaagctcattttctatataattatgtttgccgggctttgcaccaaacttcttccgtatattcgccatgtttacctgcagtttctttttactgttcagatcattatatccccatatttccttaataatcgctgcatatgtcataacttttcctgcatgttcggataatacggtaataatgttatattctatctgggtaagcttaatttctgtattatcaataaaaactcttctggcatcataatcgatcagtaatcctttagaccggaacgttccacccggaagctttccatcctcactgctgtgtctagttattctaagtgctgaacggactcttgcaactaactctgcagaactaaatggctttgttacataatcattcgctcccatgtccagtgcaccaaccttatccgattcatctgttcttgcagaaagtacaattatcggagttaatgaaactttacgaacctcgtttataaatgtagtcccatctatatccggaagtccaaggtctaaaataaccaaatccggtctatgagactcatacatcatttttcctgttgtataatcacctgccacaatcgctgcatatccattcgtctctaacaatgccactagcagatttctaatatttatttcatcttccacaacaagaattttatacttattattcattggctacctcttccatatctaaaataaacctgaattcacagccaccttcttttaaactcactgcctgaatatcccccccatgtgccttaatgatggttgcgcatacagacaaacctatcccggcattactcttgcttccatccgccggaatattctctttataaaactgactggtgaaaatattctttaatttttctttttcaataccacaaccattatcatttatttgaaaaatcactttatttccctttacaattactcttaacaacagttttgtcataccttccgcatgctctactgcattttccagcaaatttattacgacctgttcaataaggattgcatccattggtatcacaataaagtcatccggtatatcaacttccactgtctgatcaggatatctttttgcaaatttaattaatatagaatcaataagttcatccaaaaccgtttctgtctttacaatttttactttctgaccgtcaattcttgttacggtcagaagattttcaaccattctacttagccacagtgaatcctctttgattccctgaatcatctgcctgttttgttcctcgctaaactcatcataatgttctaatagtgcagaactggaaccgaaaatagtagtaagcggtgttcttaaatcatgtgaaattgcccgaagcagatttgcccgcatcttctctttttcactttctgccttgatcgcttcctgacgctttatggtcgttgtcaatccacaggtaatcactgcaacaacaagcaaaataactcctgaaattatgttttccattaccgtaaaatcaaatgaaaaatacggaaaagtaaaagcaaaattaacagccaagacacttaccagtgcggatacaaccccatagatatacccttctgtaattacagatgtcaaaaatgcacctaatacaaaaatagtcggaatcaggaaattatcttcaaatatattttggttacacaaacataataaaaaactcatcattaatatcacaatcgttatcacaatatcttttattacagagtgctcttttttcatatttcacatcacctcgattacatatattaacaacaaaccggtaaattagtggttaagaaaatataaagttatactgttttatattctctaaaatcaaaaaacaaataccggctcaaaaacaaattaaaagaatctgttcttcatccggctttttacttctgttaattctttttaatcaatactttctctacacgcttctcatttacactgagtacggtaatcttatatcccttatactcaaatgtatcacccttaactggtatacgttctaattccttcataacccagccgtttactattaccggtatttcttcatcctccgcaatttcaatatttaatacttcaaacagtttttctacattagcactgcctagtgctatgacttcatcttctgattttatctcaatttccgaatttacttcatcatgttcatcccagatttctccaacgagttcctctaagatatcttccaatgtaacaataccgattgttccgccaaactcatccaacacaaccgcaaaatgcatttttctctgctgtaattctttcaataagacaccaattttcttatttttatgtacatataatgtaggtcgcacaatttcagaaatatctttatctgtatgataaacgtaattatgaaaatctttctgataaataattcctataatgtgatccacagattcatcatatagcggaatccttgaatatgctgtttctgcaaatatttctgcaatctcttccttagtggcctgtgtcgaaacagctgtaatatcaattcgcggagttaaaacatcaattacttcctgttccgtaaactccagagcactgtgtattaatttactttcctgttcgtcaattccgccatcctgctctgcttcatctacgatgaaaagcaattcttcttctgtaatccctgtgtcatcagaagatttaaaaagcagggacaataactttttccactgtccaaagagaaaattgaacggagtcagaatcttgaccagcatatttaaaatcggagctgaaaacattgcaaatttctcaggagattcctttgcaatactctttggtgaaacctctccgaagataagcacaactaccgttgttacagccgtagatacacttggtccagcttcagcaccaagcatattcacaaacagtaccgttgcaagagatgcactggcaatattaacaatgttgttaccaatcaatatggtcgataataaactgtcatagttttcagaaagcttcataacaagctttgcttttttgtttcctttttctgccagatttttcacacggattctgtttaatgatgaaaacgctgtttccgtcgccgaaaaatatgctgacataacaatacatgctacaataattatgagtgaaattgaatcactacccatttattttacctcgttctttcaaaatactattttaaagtttctttcattttctaattgtaactcctgcctttgtccataaaagcacaaaaagacacagcccatatttattctcgtaaacacaggctatgtcccattatagttaaaatatggctcgatggtggcttacaactgtcgccgtcgtcattcataatgcatgatctccttaattaaaataattttatggtagtttagcaattatgagaaatgttgtcaatctaagcggatacttcttaaccaaaacttagccaacaatgagatatttttagaatatctttttcatctacagtacacagcacacaaataaattaaaatattattatttttaatataacaactctgattatctccaaaaagcccggaaacacgggcatttcacgggatataagaactgaatttactaccgatttactactttcggattgagctttgacacgcttctgcctcccgtgaagcccaccgcccaaatagtgacacatcgaaaattgaatacgacaccgcagatggcggcgttctcttttcccctttggggagagcaggacgccgcttttttgcgcccaaaaccagaaaggaggcgaccgcctatgtactttacttccggcagtgaacggttctttgaacagctcatgcagacgaggccgggcgcagatcattttgacaacggcgaggccggagcgccggaggactgcggcacctgccgtttctaccgcccgcactggaagtaccagttttgtgtgtatgaggaatgtccctaccagccgggcaagctcaccgcccttgacggcgcggtgaaatttcaagtgaaaggagtggacgacgagatggcagtttttcgagtggagaaaaaccggggctacacggtgatgtccaaccaccacctgcggaacaaggatttgtccctgaaagccaagggcctgctgtccttgccggaggattgggactttacgctgaaaggcttgtcccttatcaaccgagagcagatcgacgcaattcgggcggcagttaaggaactggaacaggcgggctatatcgtgcgttcccgtgagtttgacagccaaggccgcctgcgcagggcggattacatcatttacgaacagccccagcctgtgccggattcacctacattggaaaatccaacattggataatccaacgctggaaaagcctacgcaggaaaaaccaacgcaattaaataaagatagatcaagtaaagagaaatcaatgactgatggatcaaataccgattccattcctatcctttccccgccctctcctttgggggaagaagcggctgcgccgccggaacggaaaggaacgggagcgaaatcacagagcgccgtagagatttatcgggagatcatcaaggacaacatcgagtatgaacacctttgccagtatgccaaggggattgaccgggatatgctggacgagatcgtggacttgctggtggaaaccgtatgcagcgcccgaaagaccatccgcattgccggggacgattaccccgccgagctagtgaaatccaagctgatgaagctggacagctctcacattgagtttgtctttgactgtatcagcaaaaacaccacggaaatacggaacatcaaaaaatacctgctggcggttctgttcaacgccccaagcaccatcaacggctattacacggcgctggtggcccacgacatgaatactggcaaaatctgaaaggaggacgcccctatgaaacagggtgctttgatttttgacgagcagacagaccgctacgacatccgttttgaccttgcggattattacggcggcctgcactgcggagaaacttttgatgtgatggtgggcggcagatggaggccgacccgcattgaaatggccgagaactggtatctggtgggaatccatgtgatgccgacgacctctccggcctgcgggtgaggatttaagccatccgcctgcctgctgactttccaaaggagggagaaagggacgggcaaggcccatcacggccagcagatcttacagcagctcaaaaaggacggttccgccctgtccaacattgagatcaccgacgccaacatcggcttgtttaagccctgcgccaagaaatacgacattgattttaccctgcggaaagaccgcaccacccatccgccccggtatatcgtaatcttcaaatccaagcaggcggacaatctggaacaggcgtttaaggagtttacggccaagaagctcaaacagcaggaacgcccctccatccgaaagacccttgccgtcctgaaagaaaaggcagcggccagaagcagccagcagaccaaggagaaaatcaaggaaagggggctgtcacgatgaagccggaaatgaaaaagttgataatcgtcaacctgccctacctgctgtttgtttacctgttcggcaagctgggacagacctaccggctggcggctggggcggacttgtcggaaaaactattgcaccttgcggacggcttttcccttgcctttgaaagcgccgcccccagcttccacctgttcgatctggcggtgggcgtggccggtgcggtggcactgcggctgatggtgtacccccaagaccgcccggaacaaaaatgtgctggtgatcggcggttccggcagcggcaagacccggttctttgtgaagcccaacctcatgcagtgcgtgtccaaggactacctgacctcattcgtgattaccgacccgaaaggaagtctgatcggcgaggtgggccagctccttgtacggtgcggctaccgggtaaaggtgctgaatactattaacttttccaaatccatgcgctacaacccgttttgctacatccattcggaaaaggacattttgaagatggtaaacacgctgatctgcaacaccaagggcgagggcgaaaagagcgccgaggatttttggatcaaatcggaacgcctgctgtattcggcccttattggctatatctggtacgaagcgccggacgatgaaatgaatttcaccacgcttcttgaaatgataaatgccagcgaagcccgtgaggacgacccggaatttcaatccccggtagaccagatgtttgaacggctggaagaaaaagacccggaacattttgcggtgcgccagtaccgcaaattcctgctgtcggcgggcaagacccgcagttccattttgataagctgcggagccagattagcgccttttgacatccgggaggtgcgggagctgatggaggacgacgagctggaacttgacaccatcggggataaaaaaacggccctgttcctgattatgtcggacacggacacgacctttaatttcattctggcaatggtacaaagccagcttatcaacctgctttgtgaccgggccgatgacaaatacggcgggcggctgcccgtccatgtgcggctgattctggacgagttcgccaacatcggccagattccaaactttgacaagctgatctacctgtcgtccctgcgccggaaaaggcggcgcgtggtaacggaggacgaaccctttgacctctacgacattgagctgtcggatgaggattttaccgcggaataaagcggccatagagaaaggagcgtgaccgatgggacactcggacgaatctacatttgcggattatttcaagtatgagcaggaaatctaccgggctatcatttccgctgcggttctgtgccagtggatcgcagaacatgataccccgcccacggacggggaagccgaagaactggcaagggaaatagaccgcagactgtgtgaagcatggggcgagattttttcgctggctgtgctggaatggcgggacggccagtaactccgggtcgtctgcggattgtgaggctgccgctgtgtacggcggcttttttgcacccaaacaccatcacaatctgaatttatggaggtaaatttatggaatttttcaatagtgcagttgatactttgcagaccatcgttgtgggcctcggcggcgcgctttgcgtatggggcggcgtcaatcttttggagggatacggggcggacaactcggcaagcaatgctcatgtgccataaagtaacacataagaatttgatagacagaagcccactattccataaaaaatacacccataatggaaaggacacttgacatacaaaacctctgttgctataataggtgtatggaaaggatgctttccataaaaaggaggtctttatgaaaaaccgcttagaggaattgcgaaaagagagaggtatcaaacaggaagaattagctgctgaattagaagtttcaagacaaactattggttcgttggaaaacggaagatacaacccatctattttgttggctttcaaattgtcgaaatatttcggcttaaaaatcgaagatatttttatctatgaggaggaagaaaaatgaaacataaagaattgctgacacaaagcgaaagaaacgaaataaaacaattaaaaatcgaagaaaaagacgaaagaaatatagcattagccaatgcagcaaaagccagaacatacgaattgatgatgtggctctatgcaatatcaatttcattgcttgcactttttaatattatcagtgtgttagccttttttatcttgttgagtgtatttgctatttgtcaaatatattttattatcaggctatggaaatatcataaagaactataaaaaagtgtcttcgacacttcaactcccctgcccctcaatcatgaggggttaggggtttctttttgtgtcgttatgcttcataatagacaatatcaggagaagatttttgaccttgccgtacacggacggggagccgccagcattacaaggattctggtggaggaaaaagtacctacccccggctggttgaactatgacaggtacgggactttcgcaaatatctacgccggtgcgcccgcagaaaaagcctatgcgtggacgattgcacaggtcaagagcattttgaaagagaaaacctacatcggtcacagcgttcacaacaagcagagcaacatttcattcaagaacaagaaaaaggtgcggaagccgcaggaagaatggtatcgtgtggaaaatacccacgaagccatcatttccgaagaagtgttccaaaaagttcaggagctgattgcaagcagacgcaggaaacgcagaaacggtatgacgcagattttcgcaggattgataaaatgtgcagactgcggatggtctttagcctatggggaaaacaggcagaacaaaaacccatacgggtactaccattgcagtaagaacggacagggattacgccagtgttccatgcactatatccgctatgatgtgctgtatgcctatgtgcttgccagactgcaatactggtctatgctggcacagaaagacgaggacaagctgcagaaacggctgctcaatgccagcgacagagaaagaaactctgcgaagaaaaagcaggctgcggagctgaaaaaggcggagaagcgcaaagccgaggttgacgggctgtttgctaaaatgtatgaggactggtctgccggacgaattaccgagtataacttcaatatgctgtccgagaagtaccagaacgagcaaaaggagcttgaaataaaaatccggcagcttcacgaaacgatggaagccgccgtacagaccgcagcggacgctgaaaagtggattgccctgatgaagcagtatgtcaaccctgtggagttgaccgccgaacttctgaacactctaattgaaaaaataaccgtccacgaagctgtcaagagcgaggacggaagccgtgagcaggaagtagaaatctactaccgcttcatcggcaaaatcgactgacctttcttttttacccaacaatatctttaattaagggaaacgggtaaaggcctgcctgatattggaattatcaaggaattggccgaagcgctgcaggtatctattgcagaactgctgacaggagacgtggtgaaaaacgagaacacttcagggaacatgaagaaaatgagtttttacgtgtgccccatctgcgcgaatgtgatacagtcggttggcgaaggcgctttctgctgctgcgggatcacgcttcccaggcttgaagaggaagaaaaggatgatatccatatgccgcaggtggaagttatggacggtgaattccatgtattcctggagcatgagatgaccaaggagcactacatctcattctttgcatatgtgacatccaactatgcccagtttgtaaaactgtatcccgagcagaacgcagaatgccgctttaccagacgggggcatggcgctgtctatgcttattgcaacaggcacgggctatataaagtgctggtctaatgtgtctataaggcatccggagggacattccggatgccttttcgttatagatggcgaatagcaaaatttatttttatacgaatcgtaaattatgatagaataaaagtagaaatgatagattttgcatcgttttctgaacactattggcagttagggatcttagaatggagatgcaccctatgaaaaagatgaaaatggaatataagaaggctatggcaaatgatacgggaaggatcgtaagcctggtacatcatacgatcatgacggtctatccccagtattatccggaaaaagtggtggattttttctgcggccttcactgtgagaaaaacatcaggcgagatgtggaaaagggcaatgttggcatcgtatattccggagaacggctggcgggtacgggcagttttgacagaaatcatatcacaagggtgtatgtggctcctgaatttcaaagacagggatacggcagttttatcatggagcagctggaggagcggatcggccagtatcatgatgagattattctggatacctcgcttccggcaagcacaatgtacgaaaggcgcggatacaaaacactgaggcatgaacgtatagacgttggcggcggggttatgctagtctatgaggttatgaaaaaagagtgcaaggaaagataggtgattcaaggaggagactaaaatgtcccaggatagaacctacatctgcatagatttgaaatctttctatgcttccgtggagtgccgggagcgcgggctggatccgctgacgacgaatcttgtggtcgccgatcatatcggaatcctggaagaagagtcctacaaaagaaccttgtggagccataggcccctgacggatttctggagagtcggatccggcattgccaggcgcttggagagtgcaggaatctacacgatggaggacattgcaaaagcggatgaggatatgctgtaccgcatgttcggcatagacgcggaattgctgatcgaccatgcctggggaagggaaacgacgaccattgcggatatcaaagcctacaggcccaaggaaaattctatttcaagcagccaggtgctgggatgcgactatgactttgagggtggaaggctgatcgcaaaggaaatggcggatctgctctgcctggaactggtggagaaggggctggttacagattctatctctttatatgtaggatactccagacgcctgcagaagaagtccgcccatgggactatcaccatgcccgtaactacaagttccgcgaaaaagatcatgggctatacccaagaactattcgaacagatcgtcgacaggaatgcgccaatccacagagtgacgctggcatttaaccgcgtggtggatgagatgtaccagcagtatgatttgtttaccgaccctgcggagatagaaagagagcataagatacagaaaaccatgcttgagatcaaagagaagtttggggaaaatgcaatccttaagggaatgaatctggaaaagggtgcaaccacgaaagaacgcaacaggcagatcggaggacacaaaagtggagaataaaatgagccgggaagaccgggcaaaacagtttatgccgtttgccgcattaaagggatatccggaggcgctgcgcaagaaggaaaaggaagctctgccaggtgcgaaaaaatgacagggtgacggtggtttatttttgcaaggatgaatatctgaaactgacgggaatggttacaaggatagatgagacggccagagtgctgaagattgtcaatacgaagattgcgtttgaggatatctatgaattgatctgtgaagagagggcgaccggaatataaggcggcatatgcatttaaagaagttggaacaggatttttctgtctgcaaggtagaggatctgtcaaaggtgaatctggatagcgaattctgctttattggaaagacggatgaggaaagatcggtcgtatgcgtaacgacggacatcccctgtaatgtcgtagagagggaggatggctggaaagcctttcggatagagggaaccaatacggactatatcctgaccaagtcagataattatgacagagccatagaagtgcttgaacaggcaggataccagtttatatagacgggagagacagaatgatcaggaacggaggtgatttccatgtccatgtggaatccctggcggggctgccacaggcatagcgaagggtgcagatattgttatatccataagggggataagaggaaagggattgataccgggcaggtggtgcgtacggagaaattctatgcgcctgtggaaaagaccaagtccggcatctataagatgaagcctgggcagacggtgtatctgtgcttttcttcggacttcctggtggaggacgcggatccctggcgcaaggagtgctgggagatgatgcgggaaaggcaggatctgcaatttctcttcctgacaaagcggatcgagcggtttgcggcctgtatgcccgctgactggggcgacgggtatgagaatgtaacggtgggatgtaccgttgaaaatcaggagatggcagactatcggcttgcgattttccaggaactgccgcttaagcataaaaatattatctgccagcctttgattgaggcgatcggtatcaggaaatatctggatggagtggaattgacggtagtaggaggagaatccgacaaaaatgcccggcccctttcctatgaatgggtactatccatccggcagcagtgtatcagtcagaactgcgcgtttgaattccgacagtgcggcactcattttataaaagatggaaaacaatatatgcttaaggtaaaggatttgggaagccaggcgaggaaggcgaatattaattggaagggatgatgagatatgagtaataagtatgaactgatcgacgaaaagaactggaagcgcgctatgcattgcatggtatttagggatagcgttgaaccggcattctgcgtcacgttcgaattggacatcacgaagtttttaaggaagataaaagagagcgggtattcatttaccatggctatgatctttgttgtgtcaaagtgcgccaatgagatagaagaatttcgctaccgttttgttgatggccaggtagcgctgtttgagaagattgatacggcgtttacctaccttgatcaggatacggaattatttaaagtagtcaatgtgcctatgcaggatatcatggaggattatgtagaactggcagccaggacggcaagagaacagaaggaatattttaccggaccgcttggaaatgatgtattccagttctcacccatgccttgggtgtcctatacgcatatctctcatacgaattcgggaaagaaagataatgcgacgcccctgtttgactggggaaaatattttgaacgggatggaaaggtgcttcttccattttctgtacaagcgcatcattcttttgtggacggcctacatgtgggacggctggcagaagcaatccaggactatctggatcagtagaatgtagagaggaggtaagagggatgtgtagggagtgttatgcagatgacaacagaatcacgcctctattgaatccgcaggattgtctcagggaccatacccagtatatctgtggatcctgcggccgctgcatctgtatcgagcaagacggcaagcgagggcttcggaggtggaatttcccttttaagacgctggatattgcaaaactttatctgcgcactgcggattatactatgaagaagccctgtgggatttatgagatcacgaatgtaaaaggcagagtctcttataagatatttccaggggaggaagaattgcaggcttttttgaaaaagaacaaggataagtcctgcaacggcatggcaccagtattccgacagaaggagtatcaggaattcccgggcacgcaggtgcgcaggatgacagaagaagagatcgaaaagtatatggatgaacggcaggtggttggaacttgcatgccggattagcagaacaagattaaaagcagacaggaggatcatacgatgatgagagatccgcaacagacgattggcaatatggccgacaaatacagcactgccctgatcagttatatagacgaagagaggtaccctgtcacaaaggcaatgcttaagcccagagaacgccggggaattaaggagttctggttcaccaccaatacttcttccaacaaagtcaaatgctttcggaagaatccaaaggcaagtatttattttgtagataagcggtacttccgcggcgccagttcagctggcacggtagaagtgctggaaaccccggaggcaaaggaacgaatctggcgtgaaggggataccatgtattacccggaaggcgtgacggatccggattactgcgtgctcaaattcatacatacgttatctcaggcatcccttagaggtaatcaacaagggggtgaatggggatacgacccacggcgctttgaagcggctaagaaggattgtcgcttatccggagtacgaagcggtagacacctatattgtcggcattgggacgaatgacgtattgctgccgtatctgacccggatatcatggctgtggaaactacagatggagccaagatgcagacggcttcaatgcaagacggacatgaaggagtttgccgttgagtatgaaaagtatctgatacttctggctgataggcagaaaaagatgatcttgataggaatgccttatattgagttgaaaggctatcctcatgaatcgataagaatcagaaataagattatcgggcgcctggcaaaaaagtatgaggtaccatttattgatatttatgctttgcagatggaattggcttcgcagccaggggagtatacgtggaagcataggaatctgacccgcgtgggcgaaggcgtatttacggcagtacttccatttacaaaggactggcttggacggatgagaggactaaagcttacggtggacggcgtccactataatacggaatcagccaaggccctggccggggaggtacaaagacgtttggacgaattggagaaggagagaaatcattgatcaatcagaaagaaatgaacaatattaatgataacgaacagttcttcgagcagtatgcgcagatgtcgcgcagccgtcagggactgtccggggcaggaaaatggcaccagtttaaggatatgtatcctgattttgggcattgacttaagcgaaaagatgattcaggaggcagaagaaaagaacgcagatcctaagattcggtatgaggcctgcggattagaaacgtacggctatccagcggactccttcgactgcgtgatctctaatctggtcctgcattatgtcagggacctggatgagatctatggaagggtctatagaaccctgaaggaagacggcgtattcctggtgaacatcgagcatccgacttttacggcggggatcaatgaagactgggaatatgataagaacggaaatccaacatgctggcccattgataattatttttatccgggagagcgtacgactcactttggccaatgacgctgctggtcaaggcggtgaaataaaggctggaagcgatacgggaggtgtcatgagatatagtataaggcaaatgaaaacttcggagtatccgcttcttgcggagtttttatatgaagcaatctttgtaagagaaggagaagagccggctccaaggaatatcatagaaaagccggaacttcaggtatatataaaggactttggctcggataaggacgatcaccgcttcctggcacaagcggatggaaaagtagtcggcgccgtctgggcaaggaatgtaaaagggtacggaaacattgacaatacgactcctgagtttgcgatttccttatataaggaataccggagatgtggtattggaactgcattgatgggcaggatgcttgaacacctgcgggaagccggttatgagaggatttccctggcagtacaaaaggataattatgccttaaagatgtatcaggcagcaggcttttatgtcgtaggagagaacgaagaggaatatattatggtgaaggaactacggactgattatgaagcggatatccgggagatattgtcccacaggcatgataatggcgcggatctgtggactacgccggacaagaaactgttaaaaggcgcgccgtttaccacgctggagagcgtgctttatctgcgggaactgggcgttcccgcagatgatccagtgctggaagatgcggcgagcctgatctttagcacatggaaagaggatggaagattcaagatctctcccagcggcggaatctatccttgccagacggcgctggcagcggtggcgctttgccatatggggtatgccgccgacccgaggatgaagaagacattccggcactttcttgatacgcagcagccggatggaggatggaagtgtaacaagtatagttttggcagagggcctgagacagagcattctacgccctataccacgttagagatactggacgcattccgctttacggatagaaaagaagcaggtcccgcgcttgatcaggcggtagagtttctgctaaagcattggcggatccgaaagcccataagcccctgccattatggcatagggacgctgtttatgcagattgagtatccgttccgcggatatggcctcttccactatgtctatgtgctgtcattttatgaatctgcgagaaaggatgacagatttaaggaagcgctggaagtattggagtctaaactagcggacgggcagattgtcgtggagcgcgtagttcctaaacttgcgaaattatctttttgtaagaagaacaagccaagcaaacttgccacgtaccgttatcaggaaatattaaagaaccttgaatagcaaaggcttatggaaaacgggaggaaataacggggaggtgttgaaaggtgacggagagaaaagacgttatctcccactgtctgacatataagagcgtctatgaggattatcctttccgggataagaattggtgcgtgatccgccacagagagaatcggaaggtatttgcctggatatttgacagggagggctatgtgtgggtcaatgtaaaatgtgatccccagtggagagacttctggaggacggcctacgattctgtggttcctgcctaccatttaaataaagcgcactggaattcgatcattctggatggaacgataccggaaaaagagatcagaaggatgatcggggagagttacgacctgacaaagaaagagaggaagggataagaagatgtatgaatcaagatgcgggggttgctgcgaaggcatcctggaaaccgaacgtctattcctgcggccttggagggagtcagatgcggaagaattatataaatatgcgaaggaccccgaagtggggcctatcgcagggtggccgatacataccagcatagaggacagccgggagataatcagaacggtgctgtccgcgcccggaatctatgctgtggtattaaaagaaacgaacctgccggtgggaagtattggactgacggcaggggctgccagcaatatggatctaggaccggaagaagccgagataggatattggattggagtaccctactggggacagggactgattccagaggctacgaaagaaatcatgcggcacggatttgaggatctaaggcttaagacgatctggtgcggatattttgaaggcaatgaaaagtcgaagcgggtacaggaaaaatgcggatttcattcccatcatatggaaaaggacaaactctggcctctgatgaatgacattcggacagagtatattacttatataaccagagaagaatgggaagaacaaaaaagacaaggaggagtgacaggatgctagaactgccaaaaaagtcatccgcgtactgccgcctacgaagaaccataagttctgctggtataacggcgaaccggaataatacaggatctctttgtctgtagggacagtcctggggcggaatatatgcgccgccatgcggcggaaacgccagggaatgacgtgccggaaaagttaagggatatcaagacaccagcgctgattgtaagcggagggtatgatctttgcacgccatacattgccaagtatatgtatgacagaatccctgaatccagatgggagttgttccgcacttgccgtcatatgtgctttgtagaagaaaatgagcagtacatcaagctgctgaaagattggctgaatgccaatgacgaatgagaaaatagatagtaaaaggttagggaatgagactatggagagaagaaagggctatattgccgcatttatggcggggcttttgtggggggcgtcgagcccgatcgcccagtttttatttgagagcaaaggagtcgtatcaggatggctggtgccttaccgtctggtgatggcgggtatcctgctgtttctgtatgcggtagtgttcaagaagcagaatccggttgagatatggaaagacagaaaggaggcgatccgccagatcgcattttctgttctgggaatgatgggcatgcagtacacgttttttgcggccgtccaggagacgaacgcaggtacggcaaccatcttccagtatcttaatccggcaatgctgatcctatattttgcggtgatctacagagtcgcgccgaaggcaaaggagatcatcgcggtactatgctccgtatcaggaatcttcctggtggcgactcatggcaatatccacgccatgtccatctcgcccaagggaatcgtcatagggcttttggtggcgcttaccacttgcttctatggcgtgattcccggcccgcttcttaagaagcatccggcggagatggtgtgtgcctgggcaatgatgattggcggagcggtcttaatggtcgtaaccaggccgtggaggatgacgatccagattgactggcaggtaatagtcgcattcctgtctatcgtgattcttggaaccatcttcccattctgcttctacctggcatccttaaagagcataggctcggtctacgcgggcctgctatccagcgtagagccggtggctgcaacggtgctggcagcccttttccttggaactaccttccaggccatagacgtagtgggattcgtgctggtactgtccaccatgtttatcttgaattacaagaatacataaaaagctacaatacattcggacgcttaagtcgtggaatctctggactagcagggcgtcaatcttggcggtgataatgctgatatattcatagccttttgcaaggctggcattttcaagagtacaaatactttcataatggctgctccttttattatatatttcttatggacgggtatatctgtaagccggcctgcaacgctattatagcaccaaataaaaaaagagcgaaataaattgactttcaattcctacagttgtaagatgtatacaaatatgtatctgagtataagtgttctaaggaggtattcatgaaacgtaaaaagattataggaacaatggccgcgatactgatcctgctgatcgtaggagccgtggcagtcgtgctggtaagaaggccctttgatgcgggaaagccggatgaactgctggctgattattttgcatgtattgaaaaaggcgcttatgacaagatgtatggcatgctggatgaggagagcaaggccaatatctctaaaaaagactttgttacccggaatcaaaaaatatacgaaggtattgaagcaaagaatgtgaagatcagcgtaaaggatgcgaagaagacggatggaggggagaaggtatcatacctggcatccatggacagcgtggcaggaaagatcgagtttgaaaatcaggcgatgtgtaccagagactcctactttgatgagttcaaactctcctgggatgacagcctgattttcccggatatgaaggatacggataaggtgtccgtatccaccagccaggcggtcagaggccagatactggaccgtaacggcaacatgctggcaggtcctggtacagcgccgtccgtcgggctggtgccaggaaagatgtccgagaacaaagaagcggatatcgcccagctggccgggcttctgggaatgacagaagaggagattaacagccagttatcggcagcatgggttacgcctgactctttcgtgccattaaaaaccctgaacagccagcaaagccaggaattgacggagcagcttctgacgattgcaggggttctgatcaatgatacggaagtaaggacctatcctctgggagaaaaggcagcacatctgatcggctacgtgcagagcgtgacggcagaggatctggaagaacataaaggagaaggctataccagttcaagcgtcatcggcaagagcgggatcgaaggactgtatgagaaggaactcaaaggcgagaacggtgtcaagatctctattatgacggaggatggtgtggaaaagaacgtagttgcatccgtggataagcaggatggagagaatatccggctgaccattgattcggatctgcaagggctcgtctatgaccagttcagggaagataagagctgctcggtggccatgaacccgtttaccggagaagtgcttgcactggtcagcacgcctgcttatgatgataatgaatttattcttggcatgtcaggcgagcgttgggatcagctgaacaatgatgagaataagccgctgtataaccggttccgccaggtatggtgcccaggatcttccttcaagccgatcacggcgggaattggccttaccacgggaaccatcaatccggaagaggactatggaagcgaggggcttagctggcagaaggatgagagttggggggattaccatgtaacgacgcttcatgagtattctcctgtgaatctggaaaacgcgctgatttattcagacaacatctattttgccaaggctgccttaaatatcggtgcggacaatctgatgaagtcgctgaaactgctgggatttggccaggaactgccatttgagatcaagatgtcccaatcccagtacgccaacgacgggggaaccatcgattctgagatacagctggcggacagcggctacgggcagggacagattcttatcaatccactgcaccttgccaccttatatacttccatcctcaatgacggcaatgtgatccggccttatctcacctacagcgagacgccaaagagcgaagtatggatatcccaggcgttttcatccgacgcggcctccagagtgaagactgcgcttgaaaaggtggtcaataccccggaaggaaccgggtacggggcgcacagggaagatatcgcattggcgggcaagacgggaactgccgagatcaaggcagaccagaacgatacgtcgggcacggaacttggatggttcggcgtatttacagaagatgccgccgcacagaagccagtacttcttatgagcatggtggaggatgtaaaggaccggggcggaagcggctacgtagtggataagagcgcggccatcctgcagggatatcttccataataaatatttatttatgaagtaggacgaaactccggaacatatattatcaataaaggcatatgttctggagtttatcatatgaaggaagagaaaaaaagaaaatggaagaaccgaagcgttctggcattggtgctgacggtggccctggcagggtcgtacaaatatatatccggatatgtaacggtctccagcaatgtaaacggaagagaattgcccatctattcggtggagacaaaggagaagaaggttgccctttcattcgatgccgcttggggcaatgatgatacgcagaagattctggagatattgaaaaagcatggactacacgtgaccttcttcatgactggaggctgggtggaaaagtatccggaggatgtaaaggcaatccaggcagcaggccatgatcttggaaaccatagcgagaatcataagaacatggcacagttatctgtagaggaacagaagacagaaatcatgacggtccatgaaaaggtaaagcagttgaccggagtggatatgcagctgttccgtccgccttacggagaatacaatgacaatctggtcctgacagcgaaggactgtggatattttccggtagaatggtcggttgacagtttggactggaaggattatggtgtaaacagcatccttgatatggtgctaaagaacaaagaattaaggaacggggccatcatcctttgtcataacggtgcgaaatatacttcggacgcgttagagcagctgattatcggactagaagacaagggctatcagatcgttccagtatcccaactgatttataaagataattaccatatggatgtgacgggacgacagataaaggactagtgtacggtatgcctgggcatacaggaaggagaaacgatacatggagtatatgaccatcatagtaatgatcctgtttggaattgcctatgcctgcctgcgggaacgggacaggagccgggctttggcgtgcaaagcccttgccacttccatggcggttaccgcaggcctgtacggcgcagtgcaaagtcaggataccgccggatggctgattgtggctgggctcgcattatgcatgattgccgatgtagtgctggagataaggatggtgggagggatcggcatattcgggacaggacacctgtgctttatcgccgccttttggctcaagtcccctcccactccaggcacgctgctgcttttcctggccatatatgtggctgtcataggaatgttccggcatgagattgcgggcctggatgaacttaaggttccggcgtttctttatatggcggttctgggattcatggtatcgatggccgtgacgtcgggctggcccacaggtggcagggagggtgcgtttctgatggcaggggcctttctgttcctggcatcggattgtatgatcgcgtggcgcacggtgaaggatatccggcagaacgcttacggagccatcctgcttatcctttattacgcagccgtatatctgattggaagcgcgtcctggatctgattgtggattatatgcaaaaaaattgatggtccacgccctaatttctctgattattgaaaatgaactatgttataatagaactgcgccgcctggatagaaggcggctgcatgacagtatatgatagacaaattttggtacaatattatatgataggaggattatagagacatgcagagtacaagaaaggtaactgaagacattaggtgggtagggtgcaacgacagaaggcttgctctttttgagaacttgtttccgatacccagaggcgtatcctataattcttatctgattatggatgagaaggttactctgatggatacggttgacgcatccgtaacccatcaatttattgagaatctggattacacgctggagggcagaagcatagactatctcgtaatccagcatatggagccggaccattgtgccaacatcgaggaactaatgcgcagatatccgaatatggaggtggttgcaaatcagaagacaatgcagatgatcggccagttctttgatatcagcacggaggggagaacggttctggtgaaagaaggggacgagctcaataccggaagccatacgctgcgctttttgatggcgcctatggttcactggccggaagtcatggtgacttatgatgaaaaggacaaggtattattctcagcagatgcgtttggaacgttcggcgcgttgaacggcaatatatttaatgatgagatagattttgaaaaagactggctttgggatgccagaagatactatgcgaatatcgttggaaaatatggattgcaggtacaggcgctgcttaagaaagcggctgcgctggatatccggatgatctgttcccttcacgggccgatctggaggaccgatctttcctactttattgacaagtacgacaagtggagcaagtatgagccggaagatcaggaagtggcgatcatctatggatcaatctatggaaatacagagcaggcagtgaatgcactggcactgcgtctggctgaaaaaggcgttaagaatatctcagtctatgacgtatccaccgtccatgtctccgacctgatcgcggagatattccgctgcagccatcttgtatttgcatgctctacctataatggcggaatctatcctccgatggagaatctgcttgcggatatgaaggccctgtctgtaaagaaacgtacggtagcggtgatggataacgggacttgggcgccttcggcaggaaagcagatgattaagatgctggaagaaatgaaagatatgaccattctggacatgcagctgtcgatcaagtctacgctgaagcaggaacgggcggaggaactggcagcattcgcgcagcagatcgtagacgccatgtagcgggcagatgacagaagagaaagaaggatggctatggataacagagtatctgtaatcagcattattataaaagaagaggaatccatcggggcagtcaatgaactgctccatgaattccgtgagtatatcgtgggacgcatgggaattccctatagggaccgtggcgtctccattatcagcgtcgtgctggacgcgccaggcgatgccaccagttctctgtccgggaagctgggcatgctggaaggcgtaagcgcaaagacgctgactgcgaaactatagccgatggatgccgctttgcagttcctcagcccatttctgaaggttataggttctgcctccgaaaagtttgagaataacgccggtgggatgattctcattggcaaatgcattggcttcgtccgtatccacatgcatggcaagcgcaaattggggactgacgcggacgatgacatccgcaaagatgagggatcgctcataactttccatgatcacgaacacctcgtcattgtcttttacattcatctggacagcctgtacaggcgtcatgtggatgtgccttttggccacgatgacgccgtggtccagttcgatgctgcccttcgggcccatcaaggtacagccgggcgtgtctttcgtatccccggactggcgtatgattcccggaaccccaagcttgcggctgtccgtcatagatatctccagctgggtctccttgcggaaaggccccagtatggcaacattctcaaacgatcctttcggcccccggacgctcagccgctccttggccacgaactgcccgggctggcttaagtcggctttgtaggtcagttcgctgccctcgccgaacagtgcttcaaagtcattgcggcacatatggatatgccgcgcgctggtttcaattggtattgcaacgcccatatatgacaactcctttcattgcgcgatcctagtattcctattttagcaaagagtgcgggctttttcaatcgaaaggctttcctttcttcctcaaaagtcatataacatggaaactatacttataaccaattgggcgatcggtactggctggatgacgaagaataaggcaaatcctacaggaatgtttggcattttgtcacgttgacaaagtgcctttttctatctataatttaatattgtaaaacaaaggcgttttcatcatggcatgagaacgcccatttttatatgcgaaagtaactaataaaggaaggcaggttctgaaaaaaatacatatatcaggaggttgaggcaatgaattattatacgagagcagatattttaagaatagtagaggaagaagatgtgggcttcatacgccttcagtttacagatatcttcggagtcatgaagaacgtcgcgatcactgccagccagctggaaaaggcgctggatcatcagattatgtttgacggggcctcaatcgaaggctttgcgaggattgaagagtctgacatgtatctatacccggatcttgatacctttgaaatatttccatggaggcctcagcaagggaaggtagcccgtctgatctgtgatgtatataagccggatggaaccatctttcaaagtgatcccagatatgtgctgaaaaaggtaatgtcccaggcaaagtcaatgggattcgaattcgatgtggggacggaatgtgaattcttcctgttccatacggatgacgatggactgccaacgactgtgacccatgaaagcgcgggctatttcgatctcgggcctctggacttaggagagaatgcgcggcgtgatatggtgctgacgctggaggatatgggatatgagatcgaggcatcccatcatgaatccgctcccgcgcagcacgagattgatctccactatgacgaagcattggcttcagcggacagtattatgacttttaagttggtcgtaaagaccattgccaggcgccatggactgcatgctacatttatgccgaagccaaagtccggtataaatggctcaggaatgcatattaatatgtctatgagaaaagacggcatcaacatatttcatgattcaaaagatcccgcaggattaagcaaggaagcctattggttcatcggcggacttatgaagcatatgaaggccatctgctttatcaccaatccggtggtcaattcttataaacgcctggttccaggctacgaggctccagtgtacattgcctggtcagccaggaacaggacgccgctgatccggatccccgataccaggggagatgccgtaagagtcgaactcagaagccctgacccatcggccaatccatatctggcgctggcggtttgcctggcggcagggcttgagggaatccaaaatgagatcatgccgcccaagagcgttgactgcaacatctatgagatgtccgaagaagagaggaaggcttccgggatagagatgcttccgggaagccttctggaagcggccagggaatttgagaaggatgcattcatacaaagcgtgctgggagaagatctgtctaagaaatatatcgaggcgaagacaagagaatatgcagattaccgcgcccaggtcacggattgggagataagcagatacctgcaccgcctgtagacattcctgttggaacacgtagacaaggagcaaaacaggaggtgtcagcttggtaggtattattgtcgtatttcccaataagggcaatgcagccaatattcggaacctgctggttcgcggcggcatggatgtgacaggagcgtgtaccacaggcgcccaggcactgaactatgcggatgccttggatgaaggaatcgtggtatgcggttataagttaaaagatatgatgtatacggaactgcgggaatatcttccggagcaattcgagatgcttctgatcgcatctgcggataaatggagcacaggcatgatcaatggcattgtagggctgtcaatgcctgttaaggcatatgatctgatgaataccatggatatgatgcttcgcaatatagggcaaaggagaagaaagcgcaagctggaacgaaaaaccagagaccccaggcagcaggaagtgatcaggcaggcgaaagaactgctaatggcgcgcaacaacatgtcggaggaagaggcccacagatatctgcaaaagagcagtatggacagcgggacgaatatggtagagacggcccaaatggtgctaagcatcatggccgaataagaagagtagtcataaaggagagtattggtatgagatttacaaaaatgcatggtttggggaacgattatgtctatgtgaattgtttcaaagagaaggtggaacatccatccgaggtggccaggttcgtaagcgacagacactttgggattggttcggatgggttgatcatgatcaatccatccaaagtagcggattttgagatggagatgtataatgcggatggatccaggggggagatgtgcggcaacggcatccgttgcgtggcgaagtatgtgtatgattatgggcttacggataagaccagcatatctgtggagaccctgggaggcatcaaatatctggatcttaccgtcaaggatggaaaggtcgcccttgtaaaagtagatatgggaaaaccagatcttaagccggaacgaattcctatcgtatcagatgaagagcgcgtggtgaacgagccgatcatcgtgggaggcatggaataccggatgaccggggtttccatgggcaatccccacgtagtcgtctatgtgaaggatcttgaaggagtgaaaatcgaacatgtaggccccaaattcgagaatcatgagaggttcccaaagagagtcaatacggagttcgccaaggttctggaccgcaagaccgtagagatgcgtgtgtgggagagaggctccggcgagactctggcctgtggaaccggcgcctgcgcagtagcggttgccagcatattaaatggaatgacggaagaccaggttaccgtgaagctgctgggcggagacctcttgatcgagtgggatcaggaggctgacagagtctatatgaccgggcccgccaccgttgtatacgacggggagattgcaatataaacagaaaaacattataaaaaaggagacgggaagatgtttaaagtaaatgatgattacttgaagttaccaggaagttacctcttttccacgattggcaaaaaagtggcggcttttcaggaagccaatccggatcaggacattatcaggcttggaatcggcgatgtgactcagccgttggcgccggcgatcattgacgccctccacggcgcggtagatgaaatggcccatgcagagacctttcatggatatgccccggacttgggatacgagttcctaagaagcgccatggcaaagaatgattaccaggacaagggatgcgatataaaggcagacgagatattcatctcagacggagcgaaatgcgattccggaaacatccaggaaatattcgcgaaggataataagattgccgtatgcgacccggtctatcccgtctatgtagatacgaacgtaatggccgggcgtaccggagtctatgaccagaaagcggagacatggagcgatgtgatctacatgccttgtacgaaagagaccggatttgcgccccagttgccaaaagagaagccggatatcatctatctgtgcttcccgaataaccctaccggatctaccattaccaaggctcagctgcaggaatgggtggactatgccaataaggcgggcgcagtcatcatctatgacgcggcctatgaagcatacattagtgaagcggacgtgccgcataccatctatgagtgtgaaggcgcaagaacctgcgcgattgagcttcgaagcttctccaagaatgccggattcacaggcgtaaggcttggggctaccgtgattcctaaggatctgatatgcaaagacgtgatgctgcattccctgtgggcgagacggcacggaaccaagtataacggagccccatatattgtccagaaggccggggaggcagtgtattccgaagccggaaaggcacagttaaaagaacaggttgcctattatatgaagaatgccgccgtcatctacgaagggcttaaggaggcaggttacaacgtgtcaggaggcgtgaacgcgccgtatatctggctggagacgccgaaagggatgacttcctgggaattctttggctatctgctggaaagggccaatgtggtaggaacgccgggctccgggttcgggccaagcggcgagggatatttccgtctcactgcctttggatcttatgaaaatacagtccgtgcgatcgaacggattaagaagatatagcctaatagcggccttgcctggaactacgagctgtacacgcaagccaacaagaggcgcgagaagcgaaaaaaaagagggggagatcatgagatatgcggaataccccggaatagttccggggtatccatagactatttgcactcgaagtcgataggactgtcgataagcgttgcagcctgaaatttatgcttatggttatcttcctcttcggtaaagtctttgatgaagtgaacatgcttgccgtttcctacgtcaattgcgccggaggttttcccgcagaattcatggaaatgttcgtctgagaagtcggtacggaatttcacttcatggaagtggtcatgctcattgtggtagatagcctcgccggttacggtacagaatctatgattatggcaatcgccgcattcattaaaaatttttgtgcttccggtcagttcatgaacatgtttctggtctttgcaataattttgattatacattttgaaatctcctttttcttttaaaatatgataaaggggaataggttgtgaaagtgaaggcagaaggtggattaacttagggtttaattaaataacagaaaggaaacggagcatcgactggcatagagatggcaacgggatatagtgttggcattgcaataaatcacgacccggaggctatacggatgcataagacaaatcatcctaatacaagggattattgtgagaacgtctgggacgtggatccagtaaaggtctgcaatggtagtccggtgggattggcatggttttcaccagactgcaagcatttttcaaaggctaagggcggcaagccaaaggataaaaacatccgcgacagtaagaccgcgttaccaacggtaacatcatgggaccataacagccaaggataggttcggactagtcactatcgaaggtgtagattaccagatagctgatattagtttgcggatgctggaaccgcgaactatatggatgccagggatttccggatgattatataattgaccgtgattatacaggcaagacctatccaaggtcagagcaggtaaagcggtgcggtaatgcggtatgtccaccaattccagccgcactggttaaagcgaacctgccagagttatgtataactaagcgaaatggaaacatgaggatattcgaggaaaaaacaggtcagatgagatttgtgtaataggtttcgggaagtttgattgggggaaaaaaacggagctgccgaaacagccccgtcaatatcattaccaagaccgatagcggtcacagccacatctgccccagcggtcacggtcatcgcggtcacatctgccccagcggtcacggtcatcgcggtcacatctgccccagtggccacggtcatcgcggtcacatctgtcccagcggtcacggtcatggcaaggattgcagttgcgtctgcggttattttcccaagatgaatcattaaaattatcagtcatttctaaaatccttttttatttaaaatatgcggggggtgaaaaagagtgaaaattagaactaagcttatatttagtggaggtggaacaagaaattgagtagaacagtggataatctaagatttatggaaaatgaattaaaaagagagcatggtaaaaaaccaaagcatgagactctggttagaatcagaacgtttgaaaatgcaataaaggaactaatggaaagagatggattccggtaacggagcggataccagaggttggaatatatcttgtgacttgtgatattcagtaaaggtaatgaggtttaaggagtcggaagatacgcttatactaccagaaccatgtcatacctaatctttatttttacacgctgcctgtctagcgataataactcctagcatatctccaagtgctgtgagactggtagcaagtacagaaagttcatcttcggaaagacattcggaaagtttacaggcaattgtagagagaaaatataaatccgcacagttattcatgatgggaagtaccttaaaagcattttggtatatgatatgttgaatgagaggataaagtgataggtatttagagaataaaaggagtattgaaaatggcaagtatttagtgcctaagcgattatcgttgcgaaagaaaaaatgtatgtaagtagggcacagtagccctacagtttaagattcacattctggcttgtgatgtggcttatcacagttatcaagaatcggatttatcaaatccagttttgtcttcaagacggtctcgagggtgataagtttatcgaccatattttcaacagatttgttgatttcgatcaattcttttaaattgcagctgagagaaattcctttttgaagtttttctccttcagcgtttagaatgtgggatatggcggtttcttccagggcaatagactggagaagggaagatgcagcgcagcatttgtcaatgtgctcacattcaatttttggcatactcatataggtttctcctttattttaaaatctatatattgtatgcgagacagttggaaagtgctatttataaaatgggcgtttagataacaaaaaatagccagccggcctgcagataaattggtggtataaatcaggcccatgtactggcaacacaattattataatacgacaagcctgaaaaggcaaacagaacaaacgaagggaatggagatgatagattgaagaggcagaagagggacaggcatacgcttgagagcgatcggaacagcgatcccggggaaaaggcaagggagcggatacgccggccagcctagcccctggggagttatccttctaggcaaggctagtgatcaggagccagggcaggaagatggagcataagacggtagaggagtatatcagggataaggggatgttgcgtattggacaagaagatactgaatgactacatttagagccgaaagaacgtgatcgataaggtgaggagaagcaatccggacttcccgtatcagccgcagagtttcgagattgccgggacaaccgatacttacgccaataccgatctgatccggagcgaagagcacatccctatcttgatgcggatcaaaagagcaaactgcatgatgagttgccgaaatacctgattgaacagaacgagttccgccgcagcataacccttaacaagagaaatagagacagccctacaaaaagcaggaatttaagataggcgtcaatgttctggaaagggagatcatattgcaactgacaaattagtatagatgggtactgaaaaatatggtatccttatcataataaagcagcgatgcatgaagaaggtgcaatagatgattaagataatgaggcagataggccaagataaattctatattccaattcgctaggaaaatgcgctttcctatgcgcttgatgctctgagaaaatcttctatctcagcctatgtgaaggatgtgtatctatatggaagctgcgcaagaagccaggcacggtatgacagcgatgtggacctattccttgtgttaagagatgatttgcctatatcagagcatcgagaggaattaaggaagatcaagtcaaaagttatgtcagatgatatagatgatccggaagttgacctaaagattgtcataggagatgcgtgggagaccagcaatatgctctattatcagaatatcagaaaggaggggattggagtatggcattagagacgtatttggattttgcagaaaatgactataagttttttatgatcaattatcgaaaccatgtgattgccattgtaatgggagctgcagcccaggggatttgcgaaaagtatatgaagcatcttatttcggagtatatgaatcctgaaaccaaggaagaactagctaaaattacgttaagaaaaaagagaaggagaggactattcacgaaagcagaagcaaacgggatagcagacagcagcgatagaaaagaagttgtataaagaggcctatgggtagtaagatgccataagcctcttttatttttgaggaataacatggcaattacaaaattaatgcatgtgaaagaaagcaaaggctcaaatccatccgcgcatcttaagaatgcgatcgagtacatccttgatggcgaaaagacgaaaggaggatttctggcgggtggaaattgtggagcaacgccggaagcagcatacggggctatgatggataccaagatgctatatggggaaaactggggccgtcagggatatcatttcgtgctttcctttcccccggagaggtaacagcatacaatcgcttcgctaaaacgaacagataaaatattcagataggaaataggaaaatgggaggatatgacaatgagtgagataagcgagactctaaaaatagtcgaattaattggaagaggcggcttccagcttggtaaggcaagcgttaaggcgatccagtttccaggctgagaaggcaaccgcatatatggaacataaggctggccttatttcaaaaaaaatttgataccctgaatggatcttcgactgaggctttaccggtgccggaatacaaggcggacagtattcaaactaccgtatcgaaggatatagacagggattgttgcatccggctgggtagagattggcgattacatcaagttgtcttatataaaaaaattcttaggcaacaattttgataaaaaaataaggaactgcattttcatgcaatccctttatttaagccttggcttcaagtcggagtgacaagatttgaacttgcgacctctacgtcccgaacgtagcgctctaccaaactgagccacactccgaaaatgtaaccggacatcttgtcctgcaagatacccggcgcccctgccaaggaactacggatagaggactcgaacctctactaacagagtcagagtctgctgtgctgccattacaccaatccgcaatgtttttccagcgaacatgttatattataccaaatatttatcaaaaatcaaccctttttttcaactttttttattttattttgcccactaaagtattgcgtcgtttgagccgatttatattgtctataaataggtttttttgtaaaaattattaattgggcatgaaaaatggagtgtgatattctattaacgaaattatggaaaagagggaaatattatgaaaaaagcactgattatgaaaaaaacattgttaacgttgttattgtgtgtagttttgactgtgacgttgacggcaggctgcggcagcaaagccgaatccagggactcaaaaaagcctgagaaacaaaagagcagtgtcgagacaacggtagatgtagaatctgctactgcttcgcaggtggaggaatttatgagagattctgatgaaaatacgatgcttgtcgatgcacgtcctcaggaggcctattcaggctgggcactggagggagcggcgaatggcggacacttgaagaatgcggcgcttttttcagcccgctggctcgactgcgaatattctgagtctgcctcccgtgaggcttatcttgagagggcgctcaaggatcaggatatcacagaggataaggaagtgatcgtttacgattataccggagaacaggcacccgctgtggctggctatctaaaggagcagggaatcgaaaatgtgtcagtattcaaggcaaatcaactgattgacgcaggaacggatcttgaatcctatgaaaactatgacagatttatcccgacggaaattgttaagagtatctccgatgtaaagacgggaaaagaagagactctgagcgatgaagcgaaagcggtagttggcgatgacgtcagcgatgttgtcctggttgatgtaggatggggaaatgcaaagcagtctacatacttctcagtaggccatgtgccgggagcggttcatattaatacggactcctatgaaaggccacgcgtatatgtgccggagaagagatctgaatatgcaaaagagtggcgtctgatctcactagaagaattccgcgatgaagtctgcacgcagtacggaatcacgaaggattccacggtaatcttaacaggcacggtaacagatccgcagggacgtcttggatttatgctgagatcgctgggtgttaaggtctatgctatgagcggaagcctgacggtttggagttataatggctatgatctggatacaaaggccagcacgatggtaacgccagaatcggcagacagttttggaacagatacgatccagaatccggatgagatactttggatggatgacatcaaggctattttaaatggagatgcggaaggacaggttgtagacaaccgtggaaaggcggaatggaacggcaaagaaaccggatatagctatcacgatctggcaggacgtatcgatggttctatctggtgcgcgcaaggctctgagaaagaaggagagttttttgagaatgtagaccatacgccaagaacccagggcgagttgaaatcctacctggaaggcaatggtcttgacgtttctaagacgatggcattcttctgcggtgacagctggggcgctgctaagatagcctactggtgccagtccgctgatcttaataatgtaaaggaatggggcaatggctggattccatggtcaaatgaaggaaacgaattcattgatcataatggaaataaagtacactatgacaaatatcaggatgcgcttttggataaagatggaaaagatgtaagtgacggaacgaacattcttgacgatgcaacagaagaataatatgacaatgtgctcttgtttttacaggagcacatttgctgatattaaaaggtaggagagaacagatggacaagaaacgcagaaataaattattaatagcccttgcctgcatggcgcttgtaattggcgcattcgctctgattactgtagcggtgacgtcaacaacgatggcggaagcagaaacagatgcagataaagaagcagagatatccagcggtacaaagaacgatgcatcctccgattcttctgagaaaaaggcagcggaaaaactgattgacaaaacggtttcaagggaaaaggtaaagaagaacgtgggcgaatgggagaagttcgaaatgagcagcgatggatgtgagcggggagtttacgccggaaaattctactataaagattttaccattttttccagaacctatgataaaggaaaaacgttccatatcgtatcagtaaattaacgatagaaggagaaacactacatgaataattttttagggaagattggaatcaaaggcaagcttgctgaaaattttggcgcgattgttattctggcactcagcggctccgtaatctttggacttcctttcttccgattcgactattatgacgcatatatcacgacataccatctgacgaatacgcagatgggcatatttggaactgtaatcggagcctttggcatcgtatcctatcttttcggcggaattgtcgcagatggtatgtccgttagaaaaataatcgtaatatcgctgttcggcacaggggtcggaggcctccttcaccttctgccgctgggattcggagggcttttgtgcatttattcgctttggggagtctccacgacatttgccttctggcctgcctgtgtgaaagcagtgcgcgtaatgtccgacaaggacagccagggaaaagcctatggattttttgagggaacgcagaatattggcggcgccatcgtcgcgctgattgcagttgccttttttaactggggcgcctcaaggatggagaatgaggtactggcaatgaagtatgtcatcctgttctacgcatttgtaaatatcgcaatgggcgtatttgcattttttgcggtaaaagatgagaagatgatattaaatgcggaccgggtatcgtttaaaggacttgcaaaagtattgaagaatcctgccgtatggattatctgcctggtatcgttctgcaaccacgtgttctgcctgtcaatttattactatattccatatgtgacggatatccttggggccagcgtcgcgttcggagctatgctcggcgtcttccgtaagtttggctccattagcggcaacattgtgggcggatatctggcagataaattcggcactgcgcgcttgatgctgctggcttttatcgtaatgttcgcaggccagggtatgatgctcctgatgccggcaaagcattctagcgtcgtggttgtggcagtcttgtttgtcacgatcctcattttcttccatatgaattatgctatggcatggactatgatgagcgagggcgcggtacctgtggagtattccggcactgcggcaggactgatttgcacggctggcgcgattccagagacgtttgtgtccatacttgccgggaatatgatcgatcatcatccgggcgtgacaggattccgctacttcttctatttcctgacggcagtaatcggggcgggatttgtcctgattctaatctggcgaaaatatctgaagcacgccagaattgataagtctaaatttgacgacaaggctatggaagacctgaagcaatatgtataggtattaacgggcagtatttatctgtatagacttcccaaaagcggcgcagactaagaatagtttgtgtgggcgcggcatattgcgtccatggcgggaggtataggaaagtgagcgatagaatcatagtaatcggagcgaaccatgcaggtacggcagctttgaacaccattctggacaattatacggataaggatgtgactgcgtttgacgccaattccaatatcagttttctgggttgcggcatggcattgtggatcgggcgacagatcagcgggccggagggcctgttttattcggacaaggagacgctggagggaaaaggggcgaaagtgttcctggagacaaaggtgtcccggatcgattttgagaaaaagacggtatatgcaatggataaggaaggcgaggagatagaggcaaattatgataagctgatccttgccacaggatcccttcccatccaacccaaggtgaagggaatggagctaaagaatgtccagttcgtcaaactgtaccagaatgcagcggatgtaattgaaaaactggaagatccatctattcaaagggtgacgattatcggagccggttatatcggcgtggaactggcggaggcgtttgcaagaaacgggcgtaagaccaccctggtggactgtgcggatacctgcctttctgcctattacgatccggaattctgtaagatcatggaagaaaacttaagggaaaacggcgtaagaactgcatttggagagatggttcaggaaatacaaggccaggaactcgtagagcgggtagtgacagacaaggattcttatgatacggatatggccgttttttgcatcggatttcgtcccaatacccaatatgcggatggcagcctggaacttttccgtaatggggcattcctggtagatctgcatcagcaggccagcaggccggaagtatatgccatcggagactgcgcgacggtattcaacaatgcgacccagagaaaggactacattgcccttgctaccaatgccgtgcgatctggcattatcgctgcccacaatgcgtgcggaacaccccttgaatcagcaggggtgcagggctccaacgcgatctgcatctgggggcttaacatggtgagcacgggaatatctttgaagaaggcgctggaacttggctatgaggcggctgcggctgactatgaagactggcagaaggcagggttcatagaaagcggcaacgagaaggtacggatccggatcgtctatgacaagaagactcggatcgtcctgggtgcccagatgtgctcgaaatatgatatttccatggggatccacatgttctcccttgcaatacaggagcaggttacgattgacaagctgaagcttctggatctgttcttcctgcctcattttaaccagccttataattatattacgatggcggcgctgaaggcggaataatagaagcggttataactgcactacttgaatcttgaacagttagtgcagttttttagttggagaattttgtaatattctgcgaatatagactgattcaataattatatgcgatatttcaattagacacccctttaggaggggattatactgatatggaacaatacacaggaggaaagttatgaagaagaggatagtttctattttgcttatcgcagcaatggcgatgacaatggctgttgggtgcggcagcagtaaagactccggatcaggagacaaacaagaggcgtcaggagaaggcggcggaacctttatcgtgccaatcaatacgaatacggtggcatctttgacaccctataatgtatacggggcagatgatttgcttattgcatcggcaccgtgctttgacccgctatttattgtaactaaggacgagacaagatggtatctggctgaaagtctggaagcgactgcggatgatagatgccattaccagatgaaattaaaggatggccttacgtggcatgacggagaagcaattaccgctgacgatgttgtctatacggtaaatgtactgctagatcccgcgaataccagcgattcatctgaaagcgttacatataacggcaagacgatatctgcagcgaaggtggatgacttgacggtagatattacgctgcaggagccgttcagcgcatttgaaagcgaatttggaaggatacagattattccagagcatgtgttcggtggagagacgacaataaaagatgatacagagaacttgaataaagcggtgggttcgggcccgtttaaactaaaagaatataaagaaggcgattctatcgtctatgagagatatgacgactactatagaggaaaggcaagccttgatcaagtagttataaaactgatgccggatgaaagcgcgcaggaagcagcgcttcagagcggggaaatctctatgatgcggattacgaaccagacaaagttggataaatattcagcagatgataactatacggtctacaacataccggaagcacgtctgaattacatggcgtttaattaccagagtcctgcgatgaaggacttggacgccagaaaggcaatctgccttgcgcttaatgtggacgatattatttcaggagcttatggctcggaagaattggctataccggcaaaaaacttctgctctccggagaatctttactataatgacgagatggaaggatataagcagaatattgaagaagcaaaaaaacttgctaaaaaatcaggattaaccgacaagccgctgcattatatctataatacggcaaggccgaatatgaaagagacagcacagatcgttcagcagcagttgaaggagattggcgtagaagttgaacttgagggactggaaggaagcgaattttttacgcatctttttgcggcgtggattacaggagagactgtagaagatacttcttgggatatggccaccaatggcatggatcaattgaactctgatccggccaccaagatgacgagttggagaggcgatcttgtttcgaatggattttatgtaagcgatgcgacgaatgagttatgggataaagcatcccaggcattaacggcagaagagcgcgaacagtattataaagaacttcaagttcagatgaatgaggattacgctatgtatccgatggccaatacgaattatgtcatagcggtcaggaaggaatttaaaggtctggatgaaataaagagagtcccgattttcgaggattacctgaagattacaatggaataggcatatcgaaaagaccgtttgctttcaggcggtcttttcttctggaaacagtagatcataatatgtgtgaggacgataaaacgtgaaaaagtatatactaaagcgtctgttagaattaataccggttcttatcctggtcagtatattttccttttttatcattcaggcttcgccgggagatccgattgataattatgtaaggccgggaatgacggaagaacagattgaggatattaaagaagaatatgagttggacgggtcgatggcacagcagtatttccgctggatgtcgcatatcatgcgtggcgatcttggaacatccatacatcagaaccgtccggtagtcgatattattgccgagcggctgccggcaactttaatgctgatggggacggcgctggcattctcgcttatgattgcgattccattgggactatgggcaggactcagaaagaataaacgatcggataatataatcagcctgatatcctatttgggaatatcaattccgccgttctggctggcaatgattgggattattttgttttccctgaaactgcacctgcttcccagcggggggatgcatacggtgaatgtaaatacagcggcggatttattatggcatatgattctgccggcttttgtgctgagtctgaataatatggcaattttcaccagatacataaggtcaaatacaatttctcaattagaagaagactatgtacagacagcgatggcaaaaggtaccggaaagcggaaaattcttttcaggcatgtccttaagaattgtcttctgccaatcatcacgctggcaggcattaatattgcggggctggtatgcgggtcatttgtggtagaaacaatattctcgtggccgggaatcggaagactggcgatggatgcggtaggaaacagggacttcccgctgatcatgggatacactatgttttcctgcattattttaattcttgggaatctgatcgcagatgtattatatgcagtggcggatcccagaatcagacaggggatgggcagagacaatggataagagtataggttatgtaataaaaaaagacagttttgtaaggatagaaaaaaaagaagaacagatagcggcgagttatgagcggggcctcgtaaaagacgtacttcattcgctgaaagaaaataagcttgcaatgatctgcagcattattttgcttctgatcattctggcatctgtttttgccccattcagctcatatgatccggataagcaggatcttatgcagaaattgatgccgccgtcgagggagcattggtttggaaccgacgaacttgggagagattattttacaagggctttatatggcggaaggatttcattatcggtcggcgttttgtccatgctcttgtcaacaataattggcacggtgattggtactgtcagcggatatatgggcggcaagacggatatgttcttgatgcgctttactgacatttttatgtcagttccaagtttcttatttatggttgttatcaattccatgtttcctccaaaagtatggtcaatggttattattctggggctgtttgaatggtgccagattgcacggataacaagagcggagacattgtctttgaaggaaagagattttgtgcttgcatcaaagcacctgggtgccagccatgcgcagattatattcggacatattattcccaatatgagttcttccgttattgtggctggcagtctggctgtcgcaagggcgatattgacagaatccgcgcttagtttcatgggactcggggttcagcttccaaaggcctcctgggggacgatgcttcagggagcccaggtttatattatggacatgccattgcttgcagtctttccaggcgtatttgtcgtattgacagtgtttagtttcaatattctgggggatgcccttaggaatgcgctggaaccaaagatgattaaatgacggggaggagacaatgggaataatattagatgttaggaatctaagagtttcatatcatacatatgctggcgaagtacagtcagtgcgggatatctcatttcaggtgaatgagggagagacagtagccatagtgggagaatccgggtgtggaaagtctgtaacggcaaagaccatcatggggctggtggcagagccgccaggagaaataaaaagtgaaagccaggttttgtatttaggggaaaatatattagagcaatccgaaaaggaatgggaaaagtatagaggggccaaatgctctatgattttccaggatgccttgacttcattgaatccgacaatgaatatcggaaggcagattgaagagaatattacgaatcattataaagtaacaaaaaaagaagcaagggcaaaggcagttgaaatgctggaactggtaaagataccggatccggctatgtgcctgaaaaaatatccccatgaactatccggaggcatgcggcaaaggattatgattgcaatcgcgctgtccgggaaccccaagatactgatcgcagacgagcctacaacggctctggatgtaacgattcaagcgcagatcataggattgctcaaggatatccaggcaaaacttgggactacaattattctgatcacccatgatcttggcgttgtagcgagtattgcagataagattatcgtaatgtattcaggaaagattgtagaaaagggagaatgcagtgagattttcagcagctataggcatccctatacatgggcgcttttaaatgcagcgccaagcctggagattaagaataaccggaagttgatatctatcgaaggaacgccgccggatttgattaatccgcctaaaggctgtccatttgcttcaagatgcaaatactgtatgaatatttgcgtagaagctgccccgccggaatatgattatggggcgggacacaaggtctcatgctggctttatcatccggaatctggatatcaagacattgattttaataaggaggcggaagattagatgaggcagaaaaatgcaatcatagaagtgaaaaatctaaagaaatattttcgcctggattccaagcatatgctgaaagcggtagatgatgtgtcttttacgatttatgaaggagaaacgctaggaatcgtgggagagtctggctgtgggaagactacctgcggaagaacctgtattggagtctatgataagacggatggacaggtgctgtatcgggacaaagacgtacataaaatgaatctccagcagagaagagaattcacaaaacatgtacagatgatttttcaggatccatactcttcgctagatccaagattaaaggtacatgatattattgctgaaggcatgaggattcataagattgtgcattcgaaacaggaggaaatagaagaggttcagaagttattgagtcaagtaggactaaatgtagaacatgccagccgttatgtacatgaattttccgggggacagaggcagaggattggtattgccagggccttggcggtaaaccccgaattcctgctctgtgatgagcccatttccgcgctggatgtgtccgtacaggcgcaggttgtcaatcttctggtcaggcttaagaaagagcgcggccttacctgcatgtttattgcgcatgatctgtccatggtaaaatatatatcagacagagtaggggtaatgtatctggggtgcatggcagaacttgcagatgcagatgaattatatgaaaatccgctgcatccgtacacaaaggcattgctttctgctatcccggtacccaatcctgagattgaaaaggggcggccgcagatccggcttgaaggagaagtgccaagcccggtcaatccgccgcaaggatgccatttctgtaatcggtgccccagcgtgaaggaatgctgccggtatgaaaagcctgaattgcgagaggcagcgccaggtcattttgtagcatgccatctatacaatagcaaagcatagaaagaggaaagtaaaatgtatgatttcgacaaaggaatagagaggaaaggaaggaactgaggataatgcgtttgcggaagcggcacttttaggcgcatataatgactcagaagcatggcttgtggaagtaaatcaatacatagataaaaatctggactatttatgatttttccggtacggacattccgggaaaagatttgcaggagtatcttttgaaaaaatgccatgttatgtctgaggtgacgacgaattggaggcggagatgggatcagagtcagaagaatgggcagatagatatgaggattttccttgacatctttgccgaaattatacagaatgatagagtaaatgattatgatgtattatgcaggaaaaaacaatgacaagatatcaggaacggatggatgagcatcggcgttatgccagggaattggtttctggggggcaggatgaggcgctggaaaaagcgctggatatgattcggaacgctgacagaattgtaattggcggaggcgccggtctgtcggcctgcggaggactgaactatatgagcctggaagtgcttaagaaagaatttccggctcttgccaggaggggatatcataccctctgggaagcactttgggatgacagaaggacgaagcagcagaagataggcatgatggcggcggaggttctgtgggcctgctatgatttcccggtgataagggcctatcaggatctgcttcgcatggttgaggacaaggactattttgtgcttaccagtaacatcgacagacagtttcacaaggcgggatttgaagaagagcggatattcgagccacagtgcagcgcttcagatcttcagtgccagactccatgctgtcgggatatctgggacggggaatcagtctggcggaagattgcggccaatatggatagagagacgtatgcatgccgggaagaggatatcccgagatgtgatcgttgccatgccccggcagttcaaaatatgcgggggattaagtcgtttattccggacaaggtcatgtggaatcggatcgagtttgaacagtatataaaagaagccagtgatctgcggacggtatttctggaactgggagcgggcttcaattcaccgggagtcattcgccatcccttccaaaggctggcctaccgatatccgaaggctgcgctgatacggatgaatcaggaattccccaaggttccggagaaaatcaaagacaggtctgtggagatcgccggggacatgggcgaggcgcttgcgcagatgcgaaggctctatgaaaggaaatgatgatggcaagtaagaagaaaaagatgatcccgccagttctgccggaggagtttcgaagagtcgagaataccgaccagatactcaaggagttccagtacagggaagaaagagtggcggaaaccgtgcttcaagagataacggcagaagaggaggattactcccatctggtcttttcagcggtgaagttcgtaaactgcaggttctggaactgctcttttgagcgctgcgagtttacggatgtgatattcaaatcttgcgacttttccggctgcaatctgtcgaatacatattttaacagggcagaatacctatcctgcaagggagtcggcacgaagtttgctggaagcgtatgcaagaatatggtattccgggagtgtaacctgaattatgcgaatttcgatgactgcaaattggagaatctgctggttgataagacagaactgaacagcagcaatcttacccagtgcaaatgcaaggacatacagtggaggcaggcagcgcttacaaatgccagtttcttcaagactccgatgcggggcatggacttttcggacagcgagatcaaggggcttgtgctttccgatgacaatcaagaattaaaaggcgcagtggtggatctgtaccaggccgcgcagttgtccaaaagactgggaattattataaaagatatagaagggatatagggaggaactatggaagaagttacgtttagaaaggcggtcagagaggatgtgccgcttattttggaatttatcaaagggctggcggaatacgagaagatgtcggatgaagtagtcgccacagaagagatactggatgagtggctgtttgacaaagaaaaggcggaagtcatatttgcgatagcagaaggggaagaagtaggattcgccctgttcttccacaatttttccaccttccttggccgtgcgggcatttatctggaagacttgttcgtgaagccaaagtacaggggaaatggatacgggaaggcaatcttgaagcgtctggcccagatcgcggtggagcggggatgcgggcggctggaatggtcctgcctggattggaatcagccaagcattgatttctatctgtctctgggcgcgacgccgatgagcggatggaccggctataggctgacaggagagaccttggccaatattgtcgtttataatggcattcgtggtcgggaggcataaggcgctataggctttcaacaaaatgccttagttccggcgtcagttctccctgtttccatacggcgatgatttcctcggcttcttcctcgccgattagtggtatgaagaccaggttgtccgcgttggtcaatttattagtgatataggaaggcatgacggagatgccttcttctgccgctaccatcatcagaatactctccacatcgttggagcggaacaggatgttaggctggtagccggcctctttatacaagtccataaaatggctgtctccgaaggagtcgccggtgctggatggagtcatatataagatggcttcattttttaattccctccggttaagggcagagcgctgggcaaagggatgtccgctgtagagggccaccaccagaggggcgcgctcgatgatcttatggctgatggtatgctcctgcagaatattggtgctgtcccaggtgaagatgatgtcatattcattgttaaacaggcctgccgccagccggtcagtatcacagcgatagcaagtaagaagaatgttaggatattccagatgaaaggcccgcagcttgttggagagatcgcttcgctcatagcctttggtatagccgatgcgaagggttcctaccagaccggtagaggcatccttgactttgctgaccgcagtctccatccgctccaggatggcttttgcctccagaaagaatattcttccggcaggggtaagcgctaccgggcggctggaacggttgaacagctggacgttcatcgattcctccaaagcgcgaatctgctgggtgatggcggtctgggatatgtaatactggtttgcggccttggtaaaactccggtattgtgcgactgccacaaagtattttaattgattggtattcatagaggactcctgctgaaattatttgattattttttcatactataactatatcttatattaatatgagaaataagaatttgcaatcctgataagatgtaattataataataaattgttatggtacaaaggagaggtgtaaaatgaagagagaaaaatttggttctcgtctgggatttatcctggtgtctgccggatgcgcgatcggaatcgggaacgtatggaaattcccttatatgtgcggtgaattcggaggggccgcattcatattgatctacttattattcctggttattctgggaatcccggtgctggtgtgcgagttcgcggtaggacgcggcagccgtcacagcgtggcggcaagtttcgaggcattggagccggaaggaacccgatggcatatgacaaagtggatcggagtaatcggaagctatctgctgatgatgttctataccactgtaggcggatggatgatgtattattgctgccggagcatacggggagaattcgccggcgctactacggacgaagttaaggcaggattctcgaatatgctgggcaatgtgccggtgatgactttctggacggtactcatatgcataataggatttgcggtgtgcctgtttggaattcagaaagggattgagcgggtatctaagattatgatgtccgcgcttttgattattatggtagtcttggcgattcattccttctttatggaaggagccggggaaggtatccgcttttatctaattccggattttggaaagatggtggatcaaggaatcggaaatgtgatcttcggggcattgagccaggcattttttactctgtccatcggtatcggcgcgatgctgatctttggaagttacatggataaggaaagaagccttaccggagaagcggtgagcatcacggccctggatacgtttgtcgcgctgatggcagggttcatcatcataccggcatgcttttccttcgggatcgagccgggatcaggaccgagccttgtatttatcactattccgaatatatttgcccagatggcaggcggacagttatggagcgccttgttcttcctgttcctgacttttgcggcattttcaacgattgttgccgtgtttgagaatatcatatccttcgatatggatttatttaactggtcaaggaataagagcgtcctggtcagcgccgtgctgatcatcctgctcagcatgccctgcgtcctgggattcaatatccttgcgggatgcgagccattaggaagcggaaccaacatcatggatctggaagactttatcgtatccaacaaccttcttcctcttggaagtttgggatacgtgctgttctgtaccagaaagaatggatggggatgggataatttccttgcggaggtcaataccggaaaaggattccatttcccaaaaggtctgaagaattatgtaggctatggaataccgctgatcatcattatcatctacctgaaaggctattatgataaattcataagccagggaacgacggtactgatggtgtggatggcgatcgcaatccttctgcttggattcgtgctgtattgttccggatcaaaaaagaagcagtcataaatagaaatagtacaagaaaaaataatgatccggcaggagtctgcggcaatgtaatccttaagattacgccgcaggctcctgcttgatttttcatagtctgtttgctatattggcactacatcatatcgaggatagaatcttatcgaaaattcttaactgtcctttctatctgttttttacggcgagtcacctaggaaattcaagttgatggcaacaaaataagtcttaacgacttaaaatgtacacgaagagtgtgatgaccgcttgaagcgtctgcatatgatggttgaagagattaaggccagcgagcagatgggagtgacatatatgaagatggaagaaagagatcggcttcttagagaagaaggggaaatgcggattttaaccacgcaggtgtgcaaaaaacttggaaagggccttgaggtacaggcattcgaactgggagtggaagactatattatgaagccctttgacaggaaacgcctggaaaaagtgctccgcagatgcatggctcggccggatgcagcccgtactgaagcgccaacggagcgggcggccgtaaaaaggctggctatcagcagcaatgggaagactgtctttgaagatatcaaggatatcgtctatatcgagacgtacaacagaggctgtctgattcatacggcaggcaatgagtatcgggagaataagtccatcggcgagtatgaaaagaaattggaggacatgggatttttcagaattcataagagttatctcatcaatctggacaaggtaaaggaagtctttcatattaagggagcaaattgacaagcgtaagcttaccctttatgattggaaataagaaaagacaggaggtacaaagaaaatgagatatcagatacaaggcgagacgcttccggtggtaatctgcgagctggaaggcggagagaagatgatcaccgaaggcggaggcatggcatggatgtcccctaacatgctgatggagactaccaccaatggcggcatcggcaaggcgtttggacggatgttttctggagagcatatgttccagaatatctacactgcgcagggagggccgggaatgatcgcgtttgcatccagttttccgggatctgtccgtgcgttccagattgctccggggcaggagatgattcttcagaagagcgcgttcctggcaggagagatgggaatcgaactgtccgtattctttaataagaagtttagttccggcctgttcggcggagaaggatttattatgcagaaggtaagaggtcatgggatcgtgtttacagagtttgacggtcatgtgatagaatacgaacttcagcccgggcagcagattgtggtggatacgggccatctggcagctatgacggccacctgcagcatggagatcaagagcgtgccgggcgtaaagaatatgctgttcggcggagagggaatcttcaacacggtaatcacagggccgggaagagtatggcttcagaccatgccaatcagcaatgtggcaggagcattaaggccatatattccaaccggcgcataatctggccgaaagaaggaatgaggctacagattttcacccatatgctgcttgcggtattggctgggcgagcagcccatatatcgcttgaagatctggccataataggccggcgtggagaatccggccatgctggctgtttttgtaacgctttccccgtttttcagaagcaaaaggctgttctggattcgtaagaacatgacatactcaaagatagtcatcttcatatactttttgaagaacctgcagcattcactcttgcagatattgacatggccggccacatcatccagggtgatctcctgggcataatgctcctgcacgtaagtcaggatgtctttcaggcgttttagatgcttctggggatggagacgcccgacggacggctgggaggcataatgcagataaagcttctgccagatggaacacaggatcaagtgtacctgaaactcataatcttcaggtggctcctgggtcagctggtagatatcctgaatctggcggatgatgtcctgatgccaggttacatctttttctaatttgagggaatgccatagttcattggaagtaatgaagtccacgtacttggtttgaagcaggctgttctcatatccgtagatgaagcggggatgaaaggtgacggacagatagtcgcagtcctgcccgtccttcatgtagccggaatggagggtattgatgttgccgaacagcccctccccttcggagagcaggtattttctgtcgttgacataatactctatctgcccggatatgatccaggtaagttcgatctccgggtgccagtgccacaggaaatacccctgctcataggactggatggattccgggcttatgttaacgggaaattcataattcccatgacttttgatttctttttggtttttttcagtatgtatctgcatcataggcatcatttcctcaatatccttatagttttatcaaatattcttattgtatgcagggactcatctcattataattataaattagataagacggatatgcaaggaaaacataaaaacggataaggacaaatggaggttaggaagatgaaagagcgttttattcagaaatttcaggaattgtatggaaaagggggcgggatccgagcctatttcgcgccgggacgcgtgaatctgatcggagagcacacagattataacgggggccatgtatttccctgcgccctgacccttggtacttacgggattgtaagggatcgggaagaccggaagctgcggttctattctatgaattttgaaagcctcggaatcatagagaccagccttgatgatctggttccggacgaggcggccaattggaccaactatcccaaaggtgtgatgtgggcgtttgaaaagcggggatacaaactggcccatgggatggatatcctgatatacggcaatattcccagcggttcgggactttcatcttctgcatccttagaagtcctgacagggctgatgcttaaggatacgtttggctttgagaatctgaccatggtggaagtggcgctgatcgggcaggatgctgagaataattttaacggatgcaactgcggaatcatggatcagttcgcaagcgccatgggaaagaaggatcatgccatcttcctggataccaataccttgaactatgagtatgctcccgtgatacttaaggatgccaagatcgtgattaccaacagcaaggtaaagcacagcctggtagattctgcctacaatgacaggagaaatgaatgcgagacggcgcttaaggaattgcaggcggaacttcccatccacagtcttggagaactgacgcaggaagagtttgaattacataaggaggccatcaaggacccggtaagacaaaggcgggccaagcatgcggtatatgagaaccagaggacgatccgggcagtggaggcgcttcgagagaatgatgtggaactcttcggaaggctgatgaacgaatcgcaccagtctttgaaggaagattaccaggtatcctgccgggagattgatattctggcggatatggcgcaggctatgccgggagttctggggtcccgcattaccggaggcggatttggcggatgtaccgtgagcatcgttaggaatgacgcggtggatggctttatcagccagattggaaagacttatcaagaaaaagtgggccatgaggcggaattctatgtagtggatatcggcgatggagcgaagatcatatagtcccgctgtggatagaaggagagaggattatgctatttgaaaatattaagaaactggtagaatatggagttcagacaggattgacgccggaatcggagcgtatctataccaccaaccttctgctggaaatgtttggcgaggataattatgaagactgcccggtggaagatacggagattgaattagagtccgtgctgaaggaactgctggatgagtcggtaaaaagagggattatcgaggacagtatcggataccgggatctctttgacacgaagcttatgaactgcctgcttccaaggccggcccaggtgcaggagacatttgcgaagaaatatgagatatccccgaaggaggccacggagtactattataagttcagccaggacagcgactatatccgtcgctaccgcgtgaagaaggatatgaaatggaaagtggattccccctatggagagatcgacatcaccatcaacctgtccaagccggagaaggatcccaaggccattgccgcagcaaagaatgccaaggccagcagctatcccaagtgcctgttgtgcatggagaatgaaggatatgcgggccgccttaatcatccggcaagggagaaccaccggatcattccggttacggtcaatgacagcaagtggggattccagtattctccttatgtatattacaatgagcactgtatcgtgttcaacgggcagcatgtgcctatgaagattgagcgggccacatttgtcaaactgtttgacttcatcaagctctttccccattatttcctgggctccaatgcagacctgcccattgtaggaggctctatcttaagccatgaccatttccagggaggcaattatacatttgccatggcaaaagcgcctatcgagaagcaggtaacgattccgggatatgaagacgtggaggccggaatcgtcaaatggcccctgtccgtgctgcggatacggagtacggatgaaaaacggctcatcgacctggcggaccatatactggcagcctggagaggctacacggatgaggccgcattcatctacgcctgcacagaaggagagccccacaatacgattacgccaatcgcaagaaaggtgggcgatacgttcgaaatggatctggcgcttcggaacaacattaccacccaggagcaccccttaggcgtgtatcatccgcatgcgcagtaccacaatatcaagaaggaaaatatcggccttatcgaggtgatgggccttgcagtcctgccttccaggctgaaggaagaactggagatactggccggatatcttgtggaaggcaaggatatcagaagcaatgagaagattgaaaagcatgcagagtgggtcgagcggttccttccggattatgacaggattaccggggaaaatgtcatggatatcctgaagaaggaagtggggaatacattcgtccatgtactggaagatgccggagtatacaaatgtacgccgcagggacgggaagatttcatgcggtttgtgcataccttataagcagaatgatagaaaagaatgatagaaaagcaggaaggacgcgcagggcattaaaaatgccgcgtgtccttctttaatgaaatccttttaccctagatcaatgactggaataattcggtaatatcctctacagaagttccctttggatttcccggacggcatgcgtctgcataggcggattcagccaggaacggaatatcctcttcttttacaatgccttttaagtccttagggattcctacgtcctctgccagtttccttacagcgtccacggcagccttgcggtattcctcctgggacatgtcctcggtgccttttacgcccatggcggcagcaatatccttatactttgtgcccgtggcatctgcattatactccattacggcaggaagcaggatcacgttggcaatgccgtgaggcgtatcgtattttggaaaaaactgttcattgaaaacgaacatatgttctgatatgctttggaatatagaaagggtgaaaaaatggaagagaaaaccgtatatcatattgatgtgaattctgcctacctaagctgggaggcagtctaccgcctgaagttcctgggggcacgcacagacctgcgccggattccttctgccattggcggggatatcagccagaggcatgggattatcctggcaaagtccatccctgcgaaaagatacaaggtccatacaggagaacccgtcccccaggcaaggcagaaatgtcccgatcttctgatcgcgccgcccaattatggcctgtatgaaaggtgttccagggcatttgtgaatatcttaaaagaatactccccggatgtggagcagtattccatcgatgaagtatatatggatatgacgcagaccatccatctgtatggcgatcccgtccagacggcgttcgatatcaaggaccggataaaaaaggaactgggatttaccgtgaatgtgggcatctcaaccaacaaggttctggccaagatggcctcggagtttaggaagccggaccgggtacatacgctgtacccgccggagatacccaggaagatgtggcctttgccggtggaggaacttttctttgtaggaaaggccagcgcgggcaaattaagaaaacttggaattgagaccataggagaactggcagaagcggacccggaactattaaggcggcatctgaaatcccacggggaggtcatctggaactttgccaatggtcgggacttttccgtggtgcagcctgtggaagcgccgaataaaggctacggtaacagcacgaccatcagttttgacgtaaaggatgccgccacggctaagatcgtgctgcttggactggcggaaacgctggggatgcgcatcaggaaggacaaggcagagatacaagtcgtaagccttgacatctgcgactgggaatttaaccggatctctcaccagagggtgcttgagaatcccacggatattacgaaggaaatctaccaggcggccgccaggcttctggatgaggcctggaacaagatgcccatccgcaaactgggcatccataccggcaaggcgggggaggccgggtggagccggcagatgagcctgtttgattccggagactatctgaaggaaaagagatgggatagaaccatcgaccatatccgctacaggcatgggatggatgcgataaagcgggcggtgttcttggggcagcccaggattgaccatctctcagggggaatttccagggaaaagagaagcgtagactatgcaaagatcaagattgattagaaatgaaaggggcgaagagcatggcattcggagtcggagtaaataccgggaaggcagatggagggaagattaagggaaggcaggaggcagtcgcctgcggctgctggtttaccagtcagggaaacacgcttccaaagtatatcaaataccaggacgaggaagggatgatccggggaatatcagacatagaagtgctgtattcccagaagcagaattactgcggaatacccatggtggagtacgtctgccacggagtgacgcaagggatgcgatgcaacttccggctgttctttcatctggaagagtgcgcattcaagattgtatgggagtgacattgcgtgcagtcagaggcctggcctcttaggtcaatgataaaaagccgagttcacagaataaacacacatttaccacatacttttcaaaaactgcccttatactgttaagaactattatgattgacaggaggaagcgcattgattgaagtaaagaatctaaccaaacgttatggaaagcacctggccgtggacaacttaagcttcaccgtggaaaaaggccagatctatggattcctggggccaaacggcgcgggcaagtccacgacgatgaacattatgaccggatatctgggagccacatcaggcgaggtcctgataaatggacatgatattctaagagaaccccaggaggcaaaaaagtgcatcggctatctgccggaacagccgcccctctatatggaaatgaccgtatgggagtatctgaactttgcggctgaattaaagaaaattcccaaagatgaagtgaaaaaacagatagagaaggttgtgaagctaacaaggcttgaggaggtgcaggaccgcctgatccataatctgtccaaaggatacaagcagagggtaggccttgcccaggcgatcctgggatttccggagattatcattctggatgagcctaccgtagggctggatcctaagcagatcatagaaatccgggaactgatccgtacgctggccaagaatcatacggtcatcctgagttcccatattctggcggaagtccgggaagtctgtgactatgtcatgattattgccaaaggaaagcttgttgccagcgacacgccggagaatctggagaatcttatgagcggcacaggccatgtggaactggaggctaagacatccatggagaaggcaaaggctattctaaagggcattcccctaatcagcaaggccgagtaccgggaagagacgaaggagagcgttaccgtacggatagagtcagaagggcagtcagacatccgggagcaattattctttgcgttcgcgaaggaagggattccgcttctgactttgaaactgaacaagtccacgctggaagacatcttccttgaactgacgcaaggcagcgattctgcggaaagccaggacttccgggaaaatatagaggacagaaaggaggaagagacggatgagagcgatatataaaagagaactaggttcttattttcattccatgatcggctatgtatttattgcgtttttggtggcatttacaggaatttactttatggcttataacctgaactatgggtatccttatttttcttatgtcttatcaggaatcctttttgtgttcatgatagcgattcccattcttacgatgagaagtttcgcggaagacaaaaagagcaagacagaccagctgcttttgacgtcgccggtcagcctgtttaagatcgtgatgggcaaatacctggcgatggcctccatcctggcaatcccgtgcgtaatatatctgatattcccatggattattaaggcccagggcactgcgtatattctggtcgactatctgtccatcctgatgttctttctgctgggatgcgtctacatctctatcggcatgtttatctcgtctttgacggagagccagattatcgcggctatcggaaccttcggaatcttggttcttctgtacttatggaatggaattctggattttcttccttcctcggcgctggcaaatgtaatcggagccatcctgatcctgacccttgtggtggcaggaatctggcagatgacgaagaactggatgatcagcggcgcactggaggctatggtcatcgcagggagcgtgatttcctatagcgtcaaatcaagcctgtgggagaatgccctgtcacagattctgggaagactggatctgacaaaagcctttaccagtattgcgtccgaccgtctgctggacatcagcggcattatcctgtacctgtcgctgattggcatattcatctttttgactatgcagatgatacagaaaagacgttggagttaggaggaacttatgttagaaaagataaaaaagacatttcagaatcggacttcaaggaacggcagttacagcgtagggctgatcgcgctggtcgtgggcattgtggtggctgtcaatctgatcgccgctcagctaccggagaatatccgcaagatagacatcagcgacaacaagatttatgagatatccaagacaagcaaaaagatattggaagaattggatcataaagtcactttcaaagtatttgcagaaaaagattccgcggatgaaagaattcggacatttcttaagaagtatgccgctctttcagatcagatcaaggtggaatggatcgatccggtactccatccttctgcgctcaaggacaataatgtagaagccaatacgatactgatctcctgcaaagataccggaaagaccacgacggtggcctttgataagatcatcgtggtggatgaatactcatactatacgactggaaacgcgacggaatctgagtttgacggggaagggcagcttaccagcgccattcattatgtgaccagcgatacccagaaaaaggtgtattataccacaggacacggggagagcacattttcctcctctgtatcagaacttctggataagaataatatgtcggaggaagaagtgaatcttctgatggccggaaaggtgccggatgactgtgaccttctgttcctctacgggccggtcaaagatattacagaagaagaaagcaccatgcttgcagactacatgtccaaaggtggaaaggtatttctgattctgggagatgcaaaagaggatacgccgaatctgaagaaattccttgcggagtatggcatggagcagacggatggatacattgcggatatgcagaggtgctaccaggggaactattactatatcttcccggaaatcagcgcatccggagacatggcggaaggactggatacggacatggtgctactttccaatgcccacgggatgaatctgacggccccggcaagagacaccatttccgtaacgccgtttatgagtacttccgcaaacgcatatgcggtgacccaggaggagcagaaggaaggaacctatacgctgggggcggttgccacggaaagtctttcgtctgatgagggcagcgatacgggtaaagaggaaagcgccgaagataaaagcgcttccggcagcggcggggaagaaaagcaggcaaggctgaccgtcatatctgcggaaagtttgattgatgcgcagattacggacgcatttacaacgctggagaatctgaatctctttatgaacgcggtgtcagccaactttgacgacgtgcagaatgtagcaattgagccaaagagcctgaaggtgacttataatactatgcagcatgccggcctcatcagccttctattgatattcggcgtcccgtttatcatactggtctatggactggtaaaatggtggaagagaagaaaagcatagggagaaggtggggcgttatgaggcagaaaaagacgatggtaatattaatcctaatcctggcagtcctggccgctatatatggcggccttaaggcctggggcaagaagaccgccgaaaaagaagcaggagcggcagcagaaaagatcacggttacagatcttaagaatctgtcctcattttcttattcgaatggccaggagactatgagttttatcaaggaagagggaatctggaaactggaagatgataaagaaatcaggctgaaccagagcaccgtagaaagtatcggggagtcggccgcaagccttgcggcagtccgggagttaaaagagccggatgatctggaggactatggccttacgaagccttcttatacgattggcctgacgacagaagacggcgataaggaaaccctgtatgtgggggacgcggcgggagaggattactatgctatggcagaggggacgcagaaagtatataccatttccagcagcctggtatcctccctccagtttgatctgtcaggcctggcccagctggacgtggtgccggctatcagcagcggcagtctgaagaaagtaaagattacggaaaatggggaaacgacgacctacaaagaagaagatgaactggcagaactggctggaggattcggggtattgaccctgaccgaatgcgcggattatcatgtgacggacgaggaattaagcgcctatgggctggacgaggcaagacgcgtcacggcggaggcgacctataaagatgcccagtcaggggaaaaggaaacatttaccgtctacattggcaaaatgagtgaagatggcaccagcagatatgtaatggtgaaagattccaagatggcctacaaagtaagccaggatgtggtagccaacatgattactgtgagccgggaggacgcaaaagaataaaaaatactggataataaaatctcttcctgtataataaaagagagagaatatacgggagggagaacattgaggaaagatacaaccagcaccatcaagcgcgcggagcgctttcagatcatattaatcggagaaggaatactggtaggcggcatcggagggctggtggtgcttctgtaccggatgtgcctggaatacgccggcaaatggctgaatatgattctggaatatgccaggcaaagcccggtaagaatcgccgcatggttcctgatacttattgcgatggcctggcttgttgggaaactggtgaactatgagccgatgatatccgggagcggcatccctcaattggagggcgagatggcaggcaaactggagcagaaatggtggaaggtccttcccgccaagtttgtaggaggtttcttatgcctgctgggaggacttgcgctgggaagggaaggcccgtccattcaactgggcgctatggtaggaaaaggaatctcccggggaatggacagagggaagacagaagaaagattcttgctgacctgcggggctagtgccggcctttcggctgcgttccatgcaccgcttgccggggtcatgttttcgctggaagaggtgcacaaaaacttttccgtgtcagtgcttctatcggtcatgacagcctcgctgacggcagatttcctgtcttctaccgttttgggcgtagattctgtattccagtttgacattataaaggccctgccccaggagtattactggatgattgtggcgcttggaatcgttcttggcgctacgggagcattctataactggtttacgctgaaagtccagtccctctataataatgccaaatttttaaatacttcgacaaagcttatcattccgtttgtatgcgccggaattctcggatttacggcgccggaactgctgggaagcggacatgccttgattgaatatcttaccaatacggatgtgatgctggggacggtcctgtttatcctgatcggcagattcatcttctcggccgtcagtttcggctcaggcgctccgggaggcatcttctttccgctgctggtgctgggaggattcatcggaggaaccttcgccaccgtaggggtgcagttcttcgggctggatgcaatgtatattaataacttcgtactgcttgccatggccggatactttgcggcgatcgtgcgcgcgccccttaccgggatcatcctgatctttgagatgaccggctccctgagtcagatgctgtccctgtccatcgtatccatcgtggcctatattgtggctacgcttttaaagtccaagccaatctatgaaagcctgctggaacgcctgcttgagcggcaagggcagaaagtatccaaagaccatggacagaaggtactgacaaacttcgtggtgcgccagggttccaggctggaagacacgatgatcagcgagattgaatggcccaacaactgcctgcttgtggcaatccagaggggagcagatgaaatcattcccaaaggcaggaccaaactgcaggtaggagacgtgatcgtaaccatgacggacgaacgagacatcagcgtagtgcatgacaggatggaacggctgtgcagcgacatgttctaggaggattgtttatggaaaaatacaattcgataatacattctccttgcaatcgagaaatcagtgtgctaacatataaaacaaattttaattaacaaaagcaatgaaagagactctgttctttggaacttgacaggaatggggcgtcaccgactgagagcgccgcttgaggaataagaacaatagggaacactctggagcagaccgtctgaacctaagtaggccggtacgtaggcacacgttacgtgcaagagaggagccaagtcacataaaaagtcacaaggctcaaagcgggtggtaccgcggatagcaaagaagatatccgtcccgggagagatacaaacagtatccctcccgggacttttttcgcgttggcaatgaggactgcgttccaaaaccaacattgcaattcgtcccggaaaagaaaaggaggacaaaatggaatatttaacaggagtaagacacaaggacactttagaaatcagcgaattacggaagcaggcgcagccaggccagaaagtcaaagtaaacggcgcagtgcatgccatccggaatatggggacagtggcattcgtcatcctgagaaaacgggaggggcttcttcagggagtatacgaagaaggaaccgcaaagtttgacttgaaagatatcaaggaggctgccacaatagaggtagagggcgtgcttgaagaaaatgaaaaggctccgggcggcatagagatacggatggagaatctgaagatcttaagccagccccaggatgagatgatgccgctggccatttccaagtggaaactgaacacgtctctggaagcaaagttaaattaccgttccatttctcttagaaacataagagagcgtgccaaattcagaatccaggaaggattgacgcgtgctttccgggacttcctttacagccagggatttacagagattcatacgccaaagattggagcgaaaggcgcggaaggcggcgcgaacatcttcaaactggaatatttccacaggcctgcggttcttgcccagagcccccagttctataagcagatgatggtaggcgtattcgacagagtatttgagacggcgccggtattccgggcagagaagcacaacaccaagcgccacctaaatgaatacaccagcctggactttgagatgggctatatcgacggattcgaggatattatggctatggagaccgggtatctgcaatatgctatggaactgctgaaaaaagattatgcgcaagaactcaagatccttggtattacgcttccagaggtggagaagattccagcggtagaattcagcgatatcaaaaaaaaggtgtctgagaagtacggtcataagatgagaaatccttttgacctggaaccggaagaagagcagttaatcagccagtatgccaaggaggaatggggcagcgactttgtgttcgtgacacattacccgtccaagaagcgccccttctatgcgatggatgatccaaaggaccccagatatacgctgagttttgatctgctgttcagaggaatggagattacgacaggaggtcagcgtattcacgattatgaaatgctggttgagaagatcaaggcaaggggcatgtcccaggaagggatggagcagtacctggataccttcaagcatggcatgccgccgcatgggggaatcggcattggcctggagcgtctgaccatgaaactgattggggaggacaatgtaagagagactacgctcttcccaagagacttgagcaggctggagccataggggaggattcagaggtataggagaaaaaatgtatgtttggcggaaagtgttacgttaatgcgcagttctttccggaacatgcaaccatattctgcaaagacggcctttccgtggcactgacgccaagcgagaagatagagtcaacagattatttcagtttttatcaatgatagaaggaggcagttatggcacataaaatatcagacgagaccatcgaatatgtaggaattctggcaaaactcgaattaacaggccaggagaagcaagacgcgaaggccgatatggagaaaatgctggattatatagatacgttaaatgaactggacacggaagggatagaaccgatgtcccatgtatttcctattaaaaacgtattccgcgaagatgtggtgacgaacgaggacggaagcaaagatacgctggccaatgcgccgcttcagaagaacaacagtttcaaagtaccaaagacaatcggttaggagggtgcggatacaatggatattatgagcatgacagcagtagaaataggaaaaaagatcagatcaaaagaaatatcggtagcagaggccgtaaaagcatctctgagccagatagaaaaggcagaggaaaagattcatagttttgtgacggttgacagggaaggcgcgctgaaacgtgcggaaaagatccagaagcagttggaggaaggcagccttacaggccctctggcgggagtgccggtggcaatcaaggataatctttgtaccaaggatatgcttaccacctgcagttctaagattctggaaaactttaagcccacatttacagcagaggcagtaaggaatctggaaaaggcgggggcagtgatcatcggcaagaccaatatggatgaatttgccatgggcagcacgacagagacctcttatttcggagaaaccaggaatccatggaatctaaagcatgtgccgggcggctcctctggcggttcctgcacagcggtagcagcggaagaatgtgcgtttgcgcttggtactgataccggcgggagcatccgccagcccagttcctactgcggagttgtgggaatcaagcctacgtatggcacggtatcccgttacggcctggtggcctacggatcatccctggaccaggtagggccgatcgcgaaggatgtgacggactgcgcggcgattctggaagcgatcgcctcccatgatccgaaggacagtacctcgattgaccgggacgcttatacctacccgggaaaggaagaagggattaagggctatgactttaccggcgccctggtggatgatgtgaaggggatgagaatcggcatcccgcaggattatttcggagaggggctggacaaggaagtaaaagaacagattcttcgcgcggtaaaagtattggaggaaaagggcgcgattgtggaagcattcgatctcagccttgtgcagtatgcggtccctgcctattacgtgatcgcttcagcggaggcaagttccaacctgtcccgctttgacggagtgaaatatggataccgcacggaggaatacaaagggcttcataatatgtacaaaaaaacccgctctgagggattcggctccgaggtaaaacgaaggatcatgctgggttcctttgcgcttagttccggctattatgacgcttattacctgaaggcattgaagacaaaggctcttatcaagaatgcgtttgacaaggcttttgagaaatacgacgtgattgtggcgccagctgcgcctacaacagcgccggaattaggaaagagcctgagcgatccgatgaaaatgtatctggcggatgtctatactgtttccgctaacctggccggtcttccgggaatcagcgtaccggtggggcaggattccaaaggcctgcccgtgggaatgcagctgctcgggaactgctttgaggagcataagatcctccgggcggcatacgcatacgaacagacgaggccttatgaaaggccaggctttgtaaaggacatggcagggcaggaagctgcccgggcggatgaaagcaagaaagggggccgataatcatgaccagacagtatgaaacggtgatcggactggaagtccatgtggaattagcaactaagaccaagatcttctgctcttgcagcacgcagttcggaggcgcgcccaatacgcacacctgccctgtgtgtaccggcatgccggggtctcttccggcactgaacaggcaggtggtagagtatgctatggctatcggccttgccaccaactgcgagatagccagggaatgcaaatttgaccgcaagaattatttctatccggacaatccgcagaattaccagatatcccagctgtatctgccgattgcaagaaacggatatgtggagatcgaagcaggggatattaagaaaaaagttcgcatccatgagatgcacatggaagaagacgcaggaaaactgatccacgacgaatgggatgacacctcgctggtggattataaccgaagcggcgtcccgctggtggagatcgtatccgagccggatatgcggtcggcggaagaggtgatcgcttacctggagaaactgcgcaccatcatccagtatctgggggcatccgactgcaaactgcaggaaggctccatgagagcggatgtcaacctgtctgtccgggaagtcggcaaagaggaattcggcacccgaacggagatgaagaatctgaactcctttaaggccatagccagggcgatcgaaggcgaacgccggcgccagatagaacttctggaagaagggaaagaagtagtccaggaaacacgcaggtgggatgacaacaaagaggcttcctatgccatgcgttctaaagaggacgccaaggattaccgctattttccggaacccgacctggttcccgtgatcatcagcgatgaatggattgaagaggtaagattaagacagcccgaactgcgggcagagaaactagaaagatataggaaggagttcgatattccccagtatgacgcggagattatcacaaactccaagcatatggcggatattttcgaagcggccacggctatctgcaaaaagccaaagaaagtatccaactggctgatggttgagaccctccgccttctgaaggagcatgacatgcagccggaagatatccgattctcgccggagaatcttgcagggctgatcgaacttgccgacgcgggaaccatcaacagttctgtggcaaaagaagtgtttgaaaagatatttgaagaggatgtagatccaaaagactacgtagagaagcacgggcttaagacggtgaatgatgaagacgcgcttatggaagtgctgacgcacgtgattgccgagaacccgaaggctgtcgctgattttaaaaacgggaaagaaaaagcccttggagccctcgtgggacagacgatgaaggccatgaaaggcaaagcggacccggggctggcaagccagaagttaagagagatgttaaggtagcattagacagaagcggttgccatgtgttacaatgcatgagtaatatcaaggaatataaaatacgatgaatagaaaaggagaagtcatatgggaggtttttttggcgtagcgtcaaagaatgattgcgtattagaacttttttatggagtagattatcactcgcatcttggaaccagacgaggaggtatggcaacatatggcaaggctggattcaaccgtgcaatccacaacattgagaactcgccgttccgtacgaagttcgaccgcgatgtcagtgagatgaagggacaccttggaattggatgtatctcagattttgagccgcagccgctgctgattcagtctcatctgggaagttttgcagttacaacggttggaaaggtgaataattatgaagaattattgaaccggctgtataataatgcacgttctcatttccaggagatgacgaatggtcagattaatgtaacagaactggttgcggcactgatctgtgaaaaagattctatcttggaaggaatcaaatatgtgcaggaactggtagatggctccatgaccatgcttgtgatgaccaaagagggaatctacgcagccagagaccgttatggaagaacacctcttgtagttgggcataagacagatgcttattgtgtatcttttgaaagtcatgcatatattaaccttggatatacggactataaagtgttaggtcctgcagaggtcgtatatgttactccggaaggtgttgaggtgctttgcaaaccgcaggaggagatgaagatctgctcttttttgtgggtgtattacggatatccgacttcttcttatgaaggtgtcaatgtagaagagatgcgttataaatgtggtagtatgctggcgaagagagatgggaattctgttcgtccggatattgttgccggtgttccggattctggtatagcccatgcaatcggatatgcgaatgaatcgggtattccgtatgccagaccatttattaagtatacaccaacatggccgcgttctttcatgccgactaatcagagccagcgtaacctgattgcacgtatgaagttgattccggtacatgctttgattgagaataagaaactgcttctgatcgacgattctatcgtgcgtggaacccaacttcgtgagacgacagaattcttatatcagagcggagccaaagaagtacatgtccgtccggcatgtcctccgattatgtatggatgtaagtatctgaacttctcacgttccaaatcggagatggaactgatcgcaaggcagatgattaagaaacgggaaggcgatgatgtatcgaaagaggtgctggaggaatattcgaatccatgtacctgcaggtacgcgcagatgatcgaggatatcaggaagcagcagaactttacgacgctgcggtatcatagactggatgatctgttaacatctattgggattgagccttgtaaggtttgtacttattgctttgatgggaaagagtaggaagttgtgtgttatatagaaagggagtgcgcttcgcagataaatgcttatctgcgaagcgcacttctttttttcgtttaagaattacatgatagaaataaggattgctattgacaatggaaaatgtgagtgctattattgaaacataaattgtatccaatatccgatatccaaaaaagaaaggagtatagagatgaaaatagcaattggctgtgatccgaatgcacagacggtaaaagaagagttaattaagtatattgagaagaagggatatggagaggtcactgattttggcagtgaagatcccatatatgcacatacggctataaaagttgcggaaagtgttgctgcaaaggaatatgacagaggaatcttaatctgtggtacgggtattggtgtatctctggcagcaaataaagtaaaaggagcttatgcggcactgatttcagatatatattctgctacaagagcaaggctcagcaataatgcgaatatagcatgcatgggggcctttactacggggagcaaggtgagagaaggaatggtggatgcctttctgacgaatgaatttgtttcggggtgtgcatcccagccgaaggtagatgcgttcgttgcttatgataatagtcgtgaaaatggtaatggacaaaagtaagtggaggaaagaaagtgaagaagttatattttggcagtaatctaaaaatgtataagggtatggaagacacttcggcatatttgcgggaattagtagaacggaccaaggatattagtcgtgataaaatagaactttttattattccgtcatatacatctctagatgcagcggtaaaatgcggtgaccgcaattatgtaaggattggggcccagaatatgtgctgggaggatgaaggtcaatttacgggtgaaatctctccttgtatgatagaagagatgggcattaatctggtaatgatcggtcattcggagagaagacatgtttttggcgaaacagatgtagaagagaacaggaaagtcagattagcgttaaaacatggctttaagactctgctctgcattggcgagactgcagaagaaaagaaatatggtattagttctgaggtacttagaagccagcttaagataggattttatggtgttgatgcgtccgatgctttgaatatatgggtagcctatgagccggtgtggtcaattggggtgaatggaaccccggctactgcgcaatatgcagaaaaaatgcatgaagtgattaaggagactctaagagagatatttggagagaccggcgagagcattcctgttttatatgggggaagtgtcaatccccagaatgcaaatcaactcattatacagccatcggttgacggcctttttgtcgggagatctgcgtggcaggcacaggcttttgagaaacttatcagaaacgcaaaatacgtgtacgaaaatcaataatgagacagcaaaaaaatatttgcagcagtaatactaaaatatggattgaagcaaggatatggagaaaaatttaaaggaggaaataaaatgaaggaaaagaaaagtttttttaaactgatgcagagaattcctggcggattaattatcgttcctatgctggtgggtgtgcttgcaaacacgtttataccggatgtattagagatcggtggatttacgacaggaatgtttaagtcgggaacggcctgtctgctgggcatgtttttgctgctgaacggagcttctattgatgttaagaagataggaatgccactgtataagggattcgttttaacattgatgaagttcatctttggtgttgcgtttggcctgctggttaccaaattgtgcggtgtggcaggatttgcggggattactccgatggcaatcattgcagcactcactaactccgcaggaggattatatttgggacttgcacagcagtatggtgatgagacggatgcgggagcaatttcgattctgtcattaaatgacggtccgttctttactatgattgcaatgggaacagcgggtatggcatccattccgatttatgcatttattgcaactttgattcctttgatcattggtattatctggggcaatctggatgatactttccgaaaggtagctgcagatgcgatgccgattatcacattctttatgatgattccaattggagcgggaatgagcctgatgagtctggtacagggcggcatggcaggattgattctggcaatgatatcagcattgacagcatttctgttctattttgtataccagcttcttcttcctaagaataagcggaatgcaatgggagcagcaattggaacgacagcagcgaatgcgacaagtgtaccggcatctgtggcagaggtggatccaacttgggagccatatgcaggcacggcaacggcgcaggtcgccgtggcagcgattgtaacagcgtttacagcaccgatcataacttctatgtgtgataagcgtatgagaaaaaagaaactgggtatttactcagaggaagcgattgctgaacgggaaacgatggcacgaacccaagcgcagtaaagccctttgattaaggttataaaaatataatataacaattttaatgaaagagaggattattattatgtcactaacaatcagaccacttaattctggttacattccaacaaaaccactggagtattggtatcatttttcctgtaaaaaatatgtagaaaagatggggatctcgaatgaatctgatcagttgccggatttcacatttttaattgagggaggcgagaaacttgtcctggttgatacgggtatgtcctggaatgaacatgcagataaatatcatcatggaccgtccatgcagagaccaggaattgatgatatcgaatctcgtctggctcaagtgggttacaaaccggaagatgtagacattgtattgtttacacatcttcattgggatcacgttttctatattgaaaagtttacgaatgcacgtttcatctgcaatgaagcagaatggaattatgcacataatccggttccgctgcactataagtcttattgccgaccgattattgcgaaagacggggatgttacagtgggtgatgaatttgtcgcaccttatgatgcaccgggggtgaaggaacgttttgagacggtaagaggtgaagtggagattattccgggtgtcagtgtctatgaatcattcggccattgtccgggacatatgagcattgctgttcagacagaagatggtccttacttctgtgtaggggattcagtatttgtaatgggtaatattgatgcgccacaggctatgcaggatgaattgcactatgatatctgcccgccgggacgctttgtagatattgttgctgcatgggagacggttcgtgatcatgtgcgccgctgtaaagaagcaggagttgatcctcacaaacatctgctgctggcccatgatgttattttatctgccgcagtagaaaaatatgaggattctcatgataataagattccggtaatcgggacaaaagacagtgactttgtatttgatgaattcaaaactgcaatcatcgataaagatgctaaaaaagcagcagcaaaggcacaaacaaaatattttagttaattatttgttgcgtaatgttctgttgtgaagactgtcaatcggatagtcttcacaatgtgtatatagaagaaatggtgaaaaagtatgaaaacaatagcgattattgaaagttgcgatacaaaatataaagaagcagagtttattagtaattttataaaaaaggaagatttgaatactttagttcttaatacagcgacaggaccggatccctcgtataattatgacatttccagagaagaaattgcagaagcatatggaacttcatggtcagagatggagccgaaatcaaagggagaaaagattgatttcatgaaggatgcggttgcagattatgttgaaaaactgtatttggaagggaaaatcgatggaattatttccgtaggaggtttacagaacacagtcatggcagcgaacgccatgcagagacttcctattggttttccaaaggtcatagctacaaccgttgccagtggaaccagaaagtttgatttggtagtaggggataaggatattacggttatgccggcaatctgcgattttacaggtctgaatattgtaacacgtcaggtcatttccaatgcctgtgcctgttgtgtgggcatggtaaaatgtgcagggaaagtgttaaaaaaaggagacaaaccagttgtggctgttactttgatgggagtaacaaataacggtgctgttgaggctgtagaagaattagaaagggtagggttggaagtgattggattccatgcaaccggagttggcggtgcgacgatggaaaatatggctgcaagcggactggtagatgggattctggatttgacgcttcatgagttgacatcggagtattttggcggtggattttcttatggaccaagatcaagtatccgtctggtagagtctgttgaaaaaaaggtacctttggttattagtctgggaggtttggattttgttgattttagtacgaatgaacttccgggacgtatggatgaaaggaaatatatgctgcataatgccaatacagcgcatatcaagatccttccggatgaggctgaagcgctcggtaagattctggtggagagacttagtaaagtaacctatccgattaaactattaattcctacaaaaggaatgaggcataatacacaggaaggacaggagttatattcaccagagagtgatagtgtgctgattcagacaattattaacaatgtaaatgataatgtagaagttattgtaattccacataatctggatacgaaagaattcgggattaaagcagcacattatatgatagatgaaatgaaacaaagaggtaaattgtcacaggatttttcttattagggcacgagaattaggaggtatatcgatgactcaggaagtatatgaaatagcagaaaaacttgttattgcaagcaaaagagcgtataatagaggaatacagactggcagtggcggcaatgtaagcgccagaattccagggactgagacaatgcttgtgaaggcgagcggcggctcgctaggtgactgtacacccgagggatttttgattactgatttcgaaggaaacttaattgaaggggatggaaagccaaccagagaagcgttgctgcatggatatatctacaaacttcggccggatgtcaatgcggttgtacatgtacattcaccgtatgcaattgggtggtcttcttctaagaaggatctgccgctcgtaacctggcatgcacagcttaagaatccggctgcgtatccaacgctggatgtacacgcggcgatggttcgaactgaagatgttccgatggtcgaagagatgtttaagaagacatcggatatatcagcatttctattggccgatcacggtgtggttgcaatgggtaaagatgctcttgcagcagaacacgcagcggaattggtagaggagactgcacaggtagcgattctggataaactggtagagaagctcggtctgtaaataaaggaaagatgaagagttataccggatatgaatagtagagtgacaatgaaccaggaagattcaatgatactgcagagggatacatttccgatgcaggtattaaataaattgatggattggattatggacgggaaattaaaaatgggagaaaagctaaataccgaagaacttgcaagacagcttggtgtaagcaggatgccgattagagaggcattgaataggctggagaagatgggattagcagaatcagtaccctatgtaggtatgaaattagtatccctgaagcaggatgaccttttgcagatatatcagatgcgtcagcttctggaacctttagcagcaggcagagcatgtgagaagattacagaagaagacgtacaagagctggaggctatacatggggaatatatacagattgttgagcagccagaattgaatgctaaggagttgtatctgcagaatcggaaattccattttaagatttattctatcagcgatatgaatagagtatgttcagtcattgaatcattgtgggatacattatcattttttaaactgatctatggtcgagatgttatcaagaataaaactggtgtgcctaagatgattgcagaacaccagagttatattgatgccttgaaaaagagagatgctgaaactttgaagcggtcattgtatgagaacctggctgagaggatagaaggtatttcgcgggaaacagatttttatatagtgtaaaaggagaacttatgaagataaaaaaggttacgaatgcgccggagttttttaaagtagtggatagctgccaggggagggttgaacttttaactggggaaggagacagactgaacctgaagtctaaactgtgtcaatatctgtctatgtcgcagatcttctccagaagcgaggaacttcatctggagattgtggcaagtgaggaaaaggatttacagaaattatataagtatttttcgcaatatgaataaatagacatcaaaactgttggaatgggagctttgtataagctcccaatatacctttattggatttcatacgtcaggatataatcatccatcacaaacccattccctatatcagtcatttgagcatctgtaattacgaatcccaagtggttataaattgccagtgtattcgcattatacttattacaagtcagccagatctttttatgtccccgttctttacagagattaatcaggaaattcattgcttccgtagcgagatgctgtccgcggaagtctttttttatgtaaagtttgcttaagaagagtgcgtcctcctctggatgaatgccagcgtatccggctaatgtgtgggaactgtagatctggtaatactcatatccgttgttctcgacctgtgatttgatcgccggatgagactggaacttattcaccatgtaattaacctgtgcttctccgataattggagtaaaatgctgatgccagatgtcttctgccaaggtggcaatgtcttgaatctcactgtctgtctttgcctgcaatatacttactgtgtacatacttctaactccaattctttataatagttttataaataagccatttttcttctgttattatacgtgatataattgattcgtacaataatggaatattaaaaattttaatatttggaggagaatttgctgttgaagacagagtaactgacggtggttggaacgggaagcagtgcgtgttatatttaccgatgcatataatgagaagatcgaggcagttatgcaccggattgaaggcatcacggatgagcgaagcgaggcgcgaagacaggatatattaaaagcacaggcggtatgctcctttcgggagaacgggaacgacttggcgggacgtatttctgtcgtgttcatattcttggctcctgttctttagaatagttttataaataagtcaattctcttctgctattataagtgatataataaatagatacaataatgaattcagaggtcggaggaaggcaatggacaggtttgtgtcattagagggcgtgaaaaaggtatacaatatgggcgaggttaagatcatggccgccgcgggaatcgacttccagatcaagaagggcgaattcgcggtagtggtagggccaagcggcgcagggaagaccacggtccttaacattctggggggcatggatacggcgacggaagggaaggtcctggtggatggacaggatatcgctacctattcccagaagcagcttacagcgtaccgcagggatgacattggcttcgtattccaattctataatctgatccctaacctgaccgcgcttgagaatgtggaactggcgctgcagatatgcaaagatcctatggatgcggcagacgtgctggaagaagtgggattgggggagcggctgaacaactttccggcacagctttccggaggggagcagcaaagagtatcgatcgccagggctttggccaagaatccgaagcttctgctgtgcgacgagcccacaggggcgctggattacaatacaggaaaagccattctcaaactgctgcaggatacctgccgcaacaagggaatgacggtcatactgattacgcataattcggctatagccccaatggcggatcgcgtgataaagataaagaacggaaaagtttctgacattatagagaataaatatcctgtatcggttgagacgatagagtggtagaggtggcgcatgggaacaaagtctacgcgaaaagatttttatatggagataagaaagagttcagggcgttttatatcaatcctgtttattgtggcgctcggagttgctttcttttccgggatacgctcctccgagccgtcaatgcggctaaccggagatgcttatttcgacggcgcgaatctttttgacattaagacggtaagcacgctgggaatcaccagagaggatatccgggcgcttcaagatgtggatcatgtggcaaaagcggaaggctcatacagcgcggacttcctaagcaaaacagaagatgagcagtatgttcttcacgtgatggcgctgcagaaagatatgaatgaggtggcggtgacggatggcaggcttccggagaagatcggcgaatgcctagcggacgatgagatgggatacaaggtgggcgataagattacgctaaagtcgggaaccagcaatccggtatcggatacgttaaagacagagaaacttacggtagtcggaaccggcagcagcccctgctatatctcctttggcagaggcagcgcagccatcggaaccggaagcatagatggattcctgatcgtcccggaacagacgtttgacatggaggcctatacggaagcctatgtgcaggtggcgggggcaaaggaattgacgacctatacggaagcctatgataaaaagatcgaagaggtcatggatgggatagaggacatcaccggagaccggggcaagatacgaagacggcagttgctggatgatgccaatgccgaacttgacaaagccaaggatgaactcgcgaaaggaaaagaagaatctgaccagaagctaggcgatgcagccaatgccattgccgatggcgagcagcagctaggcgatgcccgggcgaagatagaggacggcaagagccagattgccgatgcgaaggcaaccttgaattccaagcagaaggaactggacaatgaaaaggcagagtatgagaacggactggcaaagtttcaggaaggaaaggccgcttatgagcagggcgcggcagagtttgccgcaggcaagccggcagcacaggaacagatccggcagggagaagaagggctggccatgttccgccagcagctggatcagggctggaacggatataaccggcttctggagaacataaaggggatggaggataatcccatggatccatcgtggcccggatatgatgaatggctcctgacattggaaggactaaaggagcaggcagatgcgacaaacaaggatcttagcgcgcaggaagaggaatatgccaagcagtctgccaaacttgaaggggcgaaaaagcagttaagcgatggcgggcagaaacttcaagatacgaaggccgctctggatgccagcgagcagcagcttagccaggccgctaaccagataaagtcggggcaggagcagatcaatgccggatggcaggaactccattcgaaggaagccacgctgaccgatggcgagaatgaactgaacgccaaggcagcggaactggaagatgccaagaaggaatatgaagacggcaaggccaaagccgaggccgagatagaagacggcgagaagaagatcagcgatgcggaaagggagatcgccgatatcgaaaagcccaaatggtatgtctatgacagaagttctctgccggagttctccggatacggagagaatgccgaccggatgcgggccataggaaaggtgttcccggtcatcttctttctggtagccgcgctgatcagccttaccagcatgacccgcatggtggaggagcagcgcaccgcgatcggaaccatgaaggcgctgggctatgacaaattcgccattgcgtccaaatatctgggctacgcccttctggcgacggtgggcggaagcgtgatcggcgtgctggtaggcgaaaagatccttccctttatcattatctatgcgtatgagattatgtaccaccacatcccgaagatattggtgccctataactggcaatatgcggcaatcgcttcctttgcggcgatcatctgtaccatggctgctacattcctggcctgctacagggagttggacgcgcagccggcggaattgatgcgtccgccatcgccgaaggatggaaagcgggtatttctggagcggatagggataatatggaagcatctgaactttacatggaagtctaccgtaaggaatctgatgcgttacaaaaagcgtttcttcatgaccatattcgggatcggaggctgtatggccctgatgctggtcggttttgggcttaaggattccatctttgatatcgcggatatccaatatgatgatattcaggtatatgacggaagcatctaccttcaggagaacctgacggaggagcagaggcaggatttgagaggattccttaaaaaagacaaggacgtgcagcgctttattgatgctaatatgcagagcgtgacgctggtcaatggtaagaaggagcgggaaacctatgaatgcgtattggaagatccgggaaaaatgaaccagtacatccaactgcgcgaccgcaagaccaaggaagcctatgaattatcggacgagggagcgatcataagcgagaagacagccaaattgctggatgcaaaggagggggacagtgtctacatcaaggatgagaaggatgggaataaagaagtaaagatcgagcatatctgtgagaattatatgggacactatctctatatgacgccaaaatactatgagaaggtgtacaatgagaagccggattataacagcatattctttgccgccaaggattcttatacgaagaagcagttggagaaggccggagaaaagattgtggcggaggatgcggtgctcagtgttggctatatgcatgacatagagaagcagctggacgatatgctaaagagcctgaatctggtaatcgttgtcctgatcatctcggcaggaatgctggccttcgtcgtgctttataatctgaataatattaatattacggaaagacagagggagcttgccacgcttaaagtgctgggattctacaatccggaagtggcagcctatgtgtacagggaaaatatcatcctgacatttgtgggagcggctgtgggagcagttcttggaaggattctccatttgttcgtgatccagacggtagaggtggatgccgccatgttcggacgtaacatcaacttgccaagttatctgtacagcctggcgtttaccgtagcattttcctttatcgtcaatggcgtgatgtattttaaactccggaagatagatatggtagagtcattaaagagtgttgaatagggtcatattttcaaaagaacttttaatataaaaattatatattcaagggaattgttagcactctttttcaaagagtgctaattttctattgacttttgaatttcttcgtattatcataactgatagataatcaagcgggagatagccgcaaaaaaattacaatgaattaggagtgataaagatggcagcaaaaaaaggcagtttatctatcagcagtgaaaacatatttccaattataaagaaatgggtgtactcagaccatgatattttcgtgcgcgaaatggtatccaatggctgcgacgcgattacgaagcttaagaaactggatatgatgggtgaataccagcttccggatggctataagcccagcatcaagattgaggtaaatccagaagaaaagacgctgaagttcacagacaatgggatcggaatgacggctgacgaggtagaggaatatattacccagatcgcattctccggcgctacagagttcctggaaaagtataaggacaagacgacggaagatgatatgatcggccatttcggattgggattctattcagccttcatggtagcggatgaagtgcatattgacacgctttcttataaggaaggcgccaccccggttcattgggtaagcaacggcggtacggaatatgagatggaagatggcaccaaggcagaggtaggatctaccatgacgctgtacctgaatgaagacagcctggaatttgccaatgaataccgtgtaagagaagtcatcgagaaatactgttccttcatgccggttgagatcttcctttccaaggaacatgcggaaccggagtatgagaccatcgatgaggcggatttaaaagaagatgatgtagtcatcgagcatattcacgaagatgccaagatggaagaaaaggaaaatgaagacggcgaaaaggaaatggtggaagtagagccggctaaggaaaaggtgaagatccagaagcgtccggtatccttaagcgacattcagcctttgtggacaaagcatccgaatgaatgctcggatgaggactatctggaattctaccgcaaggtattcctggactataaagagcctctgttctggatccacctgaatatggactatccatttaacttaaagggaatcttatacttcccaagaatcaacaccgaatatgattctatagaaggaaccatcaagctgtataacaatcaggtattcatcgccgataatatcaaggaagtcataccagaattcctgatggtattaaagggagtcatcgactgcccggaccttccgctgaacgtatccagaagcgcgctgcagaatgatggatttgtcaataagattgcggactatatctccaagaaagtagcggataaactgtccggaatgtgtaagacaaagagagaggattatgagaaatactgggacagcatcagcccgttcatcaaattcggatgcctcaaagacgagaaattctgcgataagatgaaggatgccatcctttttaagaatatcggccacaaatatctgacgctgaaagactgtatcgaggaaaacggcggagaagtagtggagccaaatgacaagaaggaagaagagagtgctgatggcagcgatgagaacaaagtagaagagattaagacgacgatctactatgtaacggatgaagtacagcaaagccagtacatcaacatgttcaagagtcagggacaggatgcggtaatactgggacataacattgattccccatttattacgcagctggagcagcgtaacccggccatccggttccagagaatcgacgctgacgtgacggataccatcaaggaagaagtggcggaagaggagaaggaagaatttaagaagacctctgacagcctgattgaaattttccgcaaagaattggaaaatgacaagctggatgtaaagatagagaaactcaaggatgacaatacggcagccatgatcaccctgtcagagcagaaccgccgaatgcaggaaatgatgaagatgtatggcatggacggaatgaatatgggcggagagagcaccctgatcctgaatgccaaccatccgctggtgcagtacgtggtagagcacaaagacagcgagaataccagcatcatctgcaagcagctctatgatctggcgatgctggcacacaaaccattaagcccggaagagatgacggcattcgtaaagaggagcaatgagatcatgatgcttctgacgaagtaaggagaatagaattacggcctccggctattttgccaaacgataagagtctgagacagtcggctttaataagcccctgtctcagactcttacatttcattttactttttgtatttgccaaatgctttttcttcatccagatgtacatccttaaaaaacacgatcagccatacaataaatgcgatcactgccatatactgcgaaataaaatacgaaaggatagcgccaatgcccataatgcccgcccagattaaaaaggcatttctctgatccctgctcatcctgtcctggtcatacagttctctttgatatttgggaatcgtattaaagccgctgatcaatatcgcggccttgcccttcaaaatcgcgaataataaagctaataacaaaaacagcagacacgaaatacccattaaaataaatccaatattcataacatcactcctaacctttcctataattcccgccagttccccagcattttccccacataagcatcccattcccgctccagcgtcttatccatggtaaaggtgtgcatggaggtgccggtgatgcattgcagcgttgtcccgtcatagtggaagttcaagtataagccctggatgtcctcggcccggcaggcgccaatctggtgcttctccaggaaagcggcaaagttttccggggccagcgacaggacgatcttgaagtttagcggggtgcgcctgcctcgtatgatggcaaagcaaagttcgcgcacctccttccagtaggagtgcgagcgcttcggggcgtcatcgaagaaatccttctgcaggaagccgtccagggtaaatttattgaatgtggtgatctctccttcgataaaggaaaactggtcaaaggtttccttcaggagaaggtgggccatacaagtttttgctgataatgtaataaagtccatatgaaaactccttttctaactctgattaatagtatagcataggtttgacttttatagggaaaaacagtacaatattcctatatgtgcaaatagggagaaggcagcagccgtgggagatatagacaaaagaaaagtaaaagaaaatgaagaaaaagatgcagtgctgcgtattgcggtgacggtagccgtcatccttctgatcataggaatcatcgttgtcgtagtaaaggttctcaatccaaaggcagatacgcagaaaggactccagaagttaaagcagatggagcagacggatgtggcgaaggtagataagaagatccggaaactggaggaagcggagcggcaggcagacgaggagtgggctagtcgtccggcaagcgagaagtttgtcaatgcgcttgtaatgggggattccgtcacgcaggggctgtctgaattcggagttctggatgcggcatatgtacaggccgaccggggaaccggggtaagcgaggcggcggataataagatcgaggaacatcttgccaaagcggaagaattaaagccccaagtgctgttcctggcgtacgggatgaatgatatcaaggcagccaggggcaatgccaaggcatttgccaaggcatataaggcggtgcttgagaggcttaaggaatcattgccagataccaggatatacgttaacagcatacttcctgtgaggcagtccgtgatcgatgagaatgaatggtatggcaacatcggcgagtataataagaagctggaggcgctgtgcgaaaaagaggatgtgacgttcattgacaacggaagcctggtaaaggaagaatattatacggaagatggaatccatatgcagccggattactatacagaatgggtgaaccatatggcggaggtcgcagatttgtgatgaagaagcggaagatagatttgcttaacatattaaaatatggaatggtcatcgtatttatcgtctatatcgtatttctcctgtcccgggagggcggtaatgaggtgccggtcaagacgataagtaagaatatcctggctgtcgtcaagacggagggaatgaagaaggggacgacccaggatcttaagaagtattatgggctgaatgccagcgattatgacggggtcatgctgtatattccggatgatgtcatgagcgtgaatgagattctggtggtcaagctaaaggacaagtcccaggccgaggccgtggaagaagccgcaagaaagcgcctggacacccagaagacaagtttcgagggctatggggcgaagcagacaaaactgattaattcggcggtactggatagcagaggctattatcttttaatggctgtttcggaagatgcggacagcatctataaggcttttaagaagagtatgtagaagaagggttaggacggcatgttattcagtagtatcgtatttttatttacatttttaccagtgattttaatcctatattatcttgtaccaagacggctgaagaatgcggtgcttcttctttgcagtcttgttttctatgcctggggagagccggtatatatattcctgatgatattttccattatatttaactatatcagcggacttgacattgcaaggaatcttaagaaccggcgcgcggcccggggaagcctgatcttcaacctgatcgtgaaccttggaattctgggattcttcaaatacgaaggcttcctgctggacagtttgaaccgcgtgctgccggtggatattccgtacagggaattagcgctgccgatcgggatctctttctataccttccagatcctttcctatattatagatgtatatcgccagaatgtgaaggcgcagaagaattttatggattttgccctgtatgtgaccatgttcccacagctgatcgcaggccccatcgtaagatactcggatattgagaagcagctgcattccagacaagagtcctttcgcaaattcggagacggcgccatgttctttatccgggggctggcaaagaaggtgctgctggccaataccattggcatggtatttacggaggttacttccctggatccggggaagatgtccgtactcagcgcgtggcttgggtgcgctgcgtataccttccagatatacttcgacttcagcggctattcggatatggcaatcggacttggcaagatgttcgggttcgaatttctgaagaactttgattatccgtacatttccagaagcattacggaattctggcgcagatggcacatttccctgagcacctggttcaaagaatatctatacatacctctggggggaaaccgggtaagcacggcgaagcatatccgcaatctgctggttgtctggttcctcaccgggttatggcatggggcggcctggaactttgtggcgtggggactgtattatggaatccttctgatcatggagaagtattttcttgggagattccttgagaagctgccaggattattgcgccatatctacagcctgctgctggtgatgatcggctgggtattcttcttcagccccggccttggaaatgcattcgggtacctgaaagtaatgttcggggcaggcgcccatggctttatcgacagggaaggcctatatctattctttacgaatgcaattctgtgggtagtcctgatacttggctctacccctttggtgcaccggacgtacgaaagactgcttgaacgcaaaggacaaggaagaatggctgtgggatgcatcctatatggcatgatgtttttgctgtgtgtggcatatctggtgacagagacttacaacccattcctgtattttagattttaggagacgcaatgaaacagacgagacagcgcaagaagggaaaactgtataataggaaggccatggcgttactgttcatcggttttttgatgttattctgcctggtgaacgtgcttgtaagggataaggaattctccgagaaggagaaccgcatgctggagcagaagccaaaactatcctggtcaggaatcgagagcgggagatatatgaagcaatatgaatcctataagtcggaccagtttgccggaaggaacttttgggtggcgtttaagacgcgggtggacctgatagccggaagacgggagtctaacggcgtgtttaagggagataataattatcttctggaagatatcgccaagcctaatcaggagcagatgaagcagaatctgaaggctatccgggaatttgaaaaagagtataaagatattcccatgtatatgatgctggttcccaatgccgccaatattctttcagagaggctgccgaactttgcggtaacggagaatcaggaagctacatttgatgcgatcaaaaagacattaggagataagatcacctgggtcgacgcaggcaaggctctgaaagcccataagaaagaagagatctattatcatacggatcatcactggaccacgcttggggcatactatgcatatgaggaattggccaaaacgatgaagctggatacaagcaaaagcccgaaactgaaagcatacgcagtgaccaatgcgtttaacggaactctgtcagccaccagcggatatgagacaggatacgaggagcctatctatatctatgttcctgagaaagaaaaagaggcggcgcaggtggtggtcagctatgtagacgaaaagaaaaagaccgccacattgtacgaccgatcgaaactgaaggaaaaggataagtacgcgttattcctgggcggcaattattccatgatagatatcaggactacggcggacaccacggaccggctgctggtgatcaaggattcttatgctaactgcctgatcccattcctgacgccatattacagggagattattgtcctggatccccgctactattatggcgatatcaaggaagtcatgaaggaaaataagatatcaagcgtgctgtttctgtataatggaaatacttttgtagaagataacagtataagtggagtattgcaaaatggtgagactgaataaatatctaagcgacgctggcgtctgttccagaagagaggccgaccggctgatcgagagcggacaggtgagcgtggatggaaaaagggctgttccgggcatgaaggttgcggatggccaggaagtaaaagtcggaaaaaaagtaataagaagcaatacggaaaagattgtcctggcggtgaataagcccgccgggattgtttgtacggaagatgtccgggaaaagaagaatattatccggtatctgaagtatccggtccgcgtcacttatgcaggacggctggataaagattcggaaggactgctgattatgaccaatgacggggacttgatcaacgggatgatgcgcgcccggcatggccatgagaaggaatacaaggtgacggtgaataagcctgtgacgcaagatttcatcagcaagatgaaagaaggcatcaggatcgtagataaggagaagcggcttgatgtggccacacggccatgcaaggcggaaaaacttggaaaatataccttctcgataacgctgacccaggggctgaaccgccagataagaaggatgtgcgaggccctcggatacaaagtggaaagactggtaagagtaaggattatgaatatagaactgggcagcctgaagccaggcgcctatcgaaaattgacagagcaggagttaaaggaattatatgaacaagtcaaagaaagccagaatgcaggaattagtagaacttcttaataaggcaggacgcgcctactatcagaatgccgaagagatcatgagcaattatgagtatgaccggctgtatgatgaacttatgaagttggaagaagaacttgggctcaccctgtccaacagcccgacagcgaatgtcggctacgaggtattaagcgaactgccaaaagagcggcatgaaaggcccatgctgtccctggataagacaaaggacgtggaagaactgaaaagattcgttggagatcagaaggcgctgatgtcctggaagatggatgggctgaccatcgtcctgacttatcgggagggcaggctttttaaagcggttaccaggggaaatggagaggtaggcgaagtagtcaccaacaatgccagggtatttaagaatattcctctgcagattgcctaccagggccaattaatcttaagaggcgaggcagtcatcggatataaagactttgaaaagattaatgaggaaatcgaggatgtggatgccaggtacaagaacccaaggaatctgtgcagcggctccgtccggcagctcaataacgagataacggcaaagcgtaatgtaaagttttacgctttttctcttgtggaagcagaaggggtggacttttacaattccagggccaggcagatgaactggctgatagagcagggatttgaggtggtagagtttcaggaagtaacccgagatacggtggaggctgaagttcttaaattttcagaaaaaatcgcccagaatgatttcccatctgatggacttgtgctagtatatgatgatatagcgtatgggcagtcactgggcaggacatccaagtttccaagggattccttcgcttttaagtgggcggacgagttaagagagacaagacttttggagatcgaatggagcccgtcaaggacagggcttattaatcccgtcgctatatttgagcctgttgaattagaaggaaccaccgtaagccgtgccagcgtccacaatatcagcattatggaagaactggaactaggcgtaggcgataccattgaagtatataaagcaaatatgatcattccccagattgccaggaacctgaccagaagcggcgttaaggatattccaaagaactgcccggtctgccgggggcggacggaagtccgccaggtcagcaacgccaaggcattatactgcatcaatccggactgccaggcaaagcatgttaagtcctttgccctgttcgtcagccgggatgcgttaaatattgaaggattatctgaagcaacactggaaaaattcatttcaatggggtatattagagagtatgcggatattttccatctggaccgctaccgggaaaagattcagaccatggaaggctttggcgaaaagtcataccagaatctgatagacagcattgagaaagccaggaccaccacccttccaagggtaatctacggtctgggaatcgcgaacatcgggcttgccaatgccaagatgatatgcaaagaattccaatatgatctggaggcaatgctcaaggctacggtagaagagttgaacgccatatccggcattggggaagtaatcgcgaccgcgttcgtggactatttttccgacaatgtccacaggaaaagactgcgcaatcttcttgcggaactcataattccaaaggaggaagcagacagcgctgcccagatatttaatggggtcaacttcgtaattacaggcagcgtggagcattttgcgaaccgcaatgaagtaaaggaattgatcgaaagcctgggaggcaaggtgacaggctcggttacttccaagaccaattatctgattaacaatgatgtgacaagcacatcgtccaagaataagaaagcaaacgatcttggcatccccattatatcggaagagaccttccttaagatggtggaagaaggccggggcaagtagaaagaagggaagaagatgtctgatcaggacaataagaacgagaatgaagttgagaaagtagaagatacgcaggtagaagtagaagatacgaagaaggatgacgatgaatatgagaaggtatgcttcatatgcaggcgtccggagagcgttgcaggcaagatgatagagctgccgaataatatctgcgtgtgcagcgactgtatgcagaagagcttcgatgccatgagcaatgggcagatcgactacagccagctgatgaatatgccgggggtgcagatactgaatatggctgacatggagcagaacatccccaagcagcagaaaattaagaagaaaaaagaaggggaggagaaaaagcctttgattaatatcaaggacatccctgctccacacaagatcaaggcaaagctggatgactatgtagtgggacaggaatatgccaagaaggctatgtccgttgcggtctataatcattacaagcgggttgctacggatacgatggatgatatagagattgagaagtccaatatgctgatgatcgggcctaccggttccggcaagacctatctggtcaagacgctggcaaggcttctggatgtgcctcttgctattacggatgccacatctctaacggaggcaggctatattggagatgatatagaaagcgtcgtatccaaacttttggcagcagctgaaaatgatatagagaaagcagaacagggaatcatctttatcgatgagattgacaagattgccaagaagaagaactccagccagcgggatgtaagcggtgagtccgtacagcagggaatgctcaaactgctggaaggaagcgacgtagaggtaccggtaggcgccaacagcaagaatgctatggtgccgcttacgacggtgaatacgaagaatatcctgttcatctgcggaggcgcgtttccggatctggaaggtattatcaaggaacgtctgaccaaacagtcttccatcggattcggggcggatcttaaggataaatatgaccatgacaagacgatacttgagaaagtgacgacggaggaccttcgcaatttcggaatgattccggagtttttggggcgtctgccaatcgtatttacgcttcagggcatgaatgagcacatgctgatcaagatactcaaagagcctaagaacgcaattttgaagcagtatcagaaacttctggcgctggatgaagtgaatcttctctttgacgacggcgcgctggaggcgatcgccaagaaggcaatgaagaaagacaccggggcgagggcgcttcgggcgattatagaagagttcatgctggatattatgtatgagataccgaaagatgacagcattggccaggtgaccataacgagagaatacatagaagggacgggaggacctcttatcatgctgaggggtcaggacgtggcaaggatacagtaatgagtgattataattatctattggatttggcaattatattgctgtgtacaaaattattgggattagcaacaagaaaggtacagatgcctcaagtcgtgggggcgcttatggccggacttatcttaggaccggccatgtgcggcgtattgacggagacaaactttatcaaggcagtagcggaattgggggtaatcgtcctgatgttctgtgccggcctggagacagatattaaggaactgaaggccagtggaaaggcatcctttatcattgcgctctgtggcgtgctggtgccgcttgccggcggatttgccctggcatatttcttcaacaagccgggcatgatcgcatcggatgccggcggaagcatattcctccagaatatctttattggcatcgtgctgacggctacttccgtaagtattacggttgaaacgttgaaagaattggggaaattaaagacgcgatccggaaatgcgattcttggagcggcgatcattgatgatatccttgggatcatagcgctaacgatcgttacgagcctggcagattcctccgtgaagttatgggtcgtgctgctgaagattgtgggattctttgtcttttctgcagttgtgggctttatattttacaaggtatacaaggaatggaccgaatcggctccaaagaatctccacaggcatgtcatcattgctttcgtgttctgccttctgatggcatatacggcggaagagttctttggcgtagcggatattaccggcgcgttttttgccggcctgatcatatccaatacccagagatccgtattcgtggagacaaagtttgatacgctgtcctatatgctgctttctcccgtgtttttcgccagcataggactgaaggtagtattgcccaagatgtcgcttaccatcgtcatattctcccttcttctgatcatcgtggcagtaattacgaagatcatcggctgcgggctgggggctaaggcgtgcgggtacaagccttaccagtataagcggattggtgtgggaatggtctcccgtggagaggtggctctgatcgtggcaagcaagggagcctctctgggactgcttggtacggcctttttagggccggtcattatcatggtggtagttacaacgatcattacgccgatattgctgaagatcgtattcaagaaaggcccggatttgcccatcccgaaggaacaggaagtatccagttactacgaagaagcggctatccttcgaggggaagccaaataaactgacatatggaatagattgcctcatatacttattaaaaagtatatggggtatttttatggatggagaaacatgccgggataagattttgtcagaggattactgggatttcctgatcccgaatttccggatggatgacttggaccaggtgcctgcggagcggtcctgccaccaagagatggacttcggctatcgcgcggtttatatcgataacagcatacttcctccacttacgatccgggaatactggtacaattctattccgaactgctatgcgctgctggacatggagactttgaacatagcaggaatcagcgcggttcagaactacccgacgcttcagctgatggggagaaacgtgatgataggttttatagatacaggtattgactataggaacccggtatttacaaatattgacggatcaacaagaatcgcagggatatgggatcagacgattcaggatggaacgcctccgggaggttttgattatgggagcgaatacacggaggataggatcaatgaggccctccgctccgagaatccgctggatatcgtgcccagcatggatatgaatggacatgggaccttccttgcaagcgtggcggcgggaagcgcggacgttccaaaccgttttcttggagccgcacctgaatccacgattgccgttgtaaaattaaagcctgcaaagagttacttgaaggatttttatgccatacgcagcgatgcggtctgttttcaggagaacgatatcatgcttggactgaaatacttaaacgatctggcgcgggaaaggaatctgcctcttgtcatgtgcattgcccttggaaccaacttcggcgggcacaatgggacgtctctgctgtctggcatgctggatgcctattcctatatattaaaccgcagcgtagtaatcggcactggaaatgaggcggccaagcggcatcatttttaccatatgctggatggaattaatgaagagactagcgcggagattcgcgtaggagaaggcgtggaaggctttgtttctgaattatggacgatgcttcccaatgtagtgacgatttccatcacttcgccctccggggaacggacaaggcagatatccataaggcagggagaccggtataatctaagattttcctttgagaagacggaggtatcggttgaataccgccttcttttggaaaataacgattcccaactgatatttctgcggtttcagaatccagtgccaggcatttggcagatcaatgtggagcctgttcagatcgctgagggggattttcatatctggcttccgatccaggagttcctgtccggcgaagtctattttctggaatccaatcccgacacgacgcttacggaaccaggaaccagcagatcagcaatgacggtcgcctattataacggacgggataatggagttgatattaattcagggaggggttatactagagatggattagtcaagcctgattttgcagcgcctggggtgatggttacaggtgcgggattaaacggacagtttgttaccaaaagcggctcaagcgtatctgccggcatcacggcaggagcagtggcgcttctgacggaatggctgcagaatgagccgggagcgcgcggcgtgaactccagccagataagaagcatcatactgctgggcgtgaaccagaggccgttgatggaatatccgaacaaggaatggggatatggaacgctggacttgtaccgtgcccttgatacgctgcggagaatataaatgattatatcaaaggataaaaggagaagaaaagatggcagatttttttgaagaattagggaaacgaatctcagatgtagcaagcgatctgggaaagaagacggaagatacgattgaaatccagaagatcaaaggtgagatccgttctttgaagcgtgcaaatgacagggatctcatggatctgggacgcatggtgtatgataaattccaaaaaggggagataccggatactgattatatcgacctctgcgacaacattgagaagagagaggaagagattgagaggcaggaagaagagattgtaagaatcaaagaggatatatagatgctttcgttaatagcggccggcacatttacggtactgctgggattggatgtactcctaaagcagcatgtagaagaaaatatcaagtccggagaagaaaaaaaagtgcttgggggaaaagtcgtcatacgcaaggtgtataacaaagggttcctgctgaattccctggaaagccatcctgtgctgatcaagacggtatccatcctggcgggggcaggcgtgcttgcgtgcggcgcgtggacatttgtcagaaaaggacatttcaccgagaaactgggcatggctattctgggggcaggcgctgcaagcaatctgtttgaccggctgtcaagagggaaagtcattgattatatcggaatcaggagcaaaaatcaatttcttgccaggctgacagccaatctgggggatttctatattcttctgggggcagttttgctggcactgaaaagatcatacccggaattgtctgaggaggagttaaaagagatctctgagaaggtgaagagccgtaagttcaaattataagaggcaatggcagcattgcctcttttctttattatatatgtctgctacagttggaagaattcctttacctgccccaggatgatgcccataagcctggttctggactccacgcttgcccagcccacgtggggagtgatgaaaagctttctgctgtctgtaatgcgaagcagaggattgtccggactcattggctccgtacaaagcacatctaagcctgcggcggcaatctcgccttgctccagggcggcagcaagatcctgctcgacaacgataggaccccggccaaggttcagaaagatgcaggttttcttcatcttctgaaatgcccgggcatcaatcagattttccgtttgggcattgagcggcgcgtgtacggagataatatcggaagaggcaagcaaagtatccatgtctacctgatggtagccatcctgaggggcgctgccggaaggagaggcgtagataacatttagtccaaaggcctccgcaatagaggctacccgcctgccgatattgccaagcccgatgatcccaaaggtcttgccatgcaactcataaaaccgttcttcaaagtgcgtaaagatcgtatcattggtatagcggccttcttttacataatcatcatagtaccgaagtttctcaagaaggaaaagcagcattgcaaaggtgtgctgcgcgacggattctgttgaatatccggcaacattcctccatgcgatattgcggctttttaaatagtccttatccagattattagttcccgtggcagtcacgcagaccaacttcaggttccgggccttcccaatagtcgattcatttacctgtatcttatttacaatcattacgtcggcatcttcgacccgcccagggacttcttcggaagtagtgaaaggatacttcaccacctcgcctaactggtcatagccggacaagtcgatgtcttcgccgattgtctttacatctaggaatacgattttcataaaacaggcctcccttacatattcatttatcagtatattggaaaattatatcacaggaaagtgattacgaaaacagaatacttagaatcgggcatgaaaaaagcgggtgatgggaatcgaacccacgtatccagcttggaaggctggtgttctaccattgaactacacccgcatatcggggtgacaggattcgaacttgcgacctcctggtcccaaaccaggcgctctagccaaactgagccacaccccgtaataacttatctgattgtgaacgtttcacgctgtgaacgaaataaataatatcatttttggaaacaaatatcaagagttaattgcaaagaatgttaaaaaaataccagccatgaaatatcccatggctggcattcccccttattctcctcccgggccgtctttccttggccgctgggattctggcagcggttccactgcctttgtaggattcagacgttcgtcattggattccttatccttctgcttgtctgaaatcgttggaataggtgcttcaactatctctttcatgcgtaatcctccttgcctattctgcctctccctctgccacgatatcttccagaacgtgaattaagtcgtggatggattccagccttacatcccgttccaggatacagtttttaagattaatagacagtgattcgaatttgtcccggattgccggggatacataggatgccatataatcacctcgctatagtatgtgcagaaagcggccggtttattaattttgaatttggcagggactttaagttgaagtgaaggatacccgtgtgacgggttatccttcaggaaagaattgcagatcaatctaaggtattcatcattttccaagcacagcagcaaggcgtactgcaagtaccggaaaccttgataggtcaaatatgacaaaagtttattgaactcgtcgagattcgaccggcttggaaataggaaataaaaaaatggagtatacgggacttgaacccgtgacctccacactgccagtgtggcgcgctcccaactgcgctaataccccataccgagattatagcatggaaactggcagatgaaaagcagtaattttactatttccgttctgaatcatcaatcatcttctgaagcttggtacgcattgcgtctttatcctctgcggagaggcgaagggcgtcttcctctttcaactcttttaatgttctgtctgcctcctggacaaatgctgttttaattatttttttaatatcatacatagaatctacctcctgttactatcataaaccagttaaagcactgttgggaaaggaaatatatggaaaataagtgatttaagaattccttaagttgatactagaatttcattattgtataataactactatatcataaaatgaataattgtatatttattatagataacctagttagaacatgagaggatgagcatataaatggcacaaaagaagaggacaagacagtctagaaggaggcagcaggttcggcgccaactgctgatcgtgctggttttaattgtggcggtcgtctgcgcggcagtcagctgccatatacaggagacaaggcacaaggcagaggcaaaagcagctgtcaagacagagcagcagaaatcctcaaaggggaagaaggagaatgccaaggtaaaggtagagacgccaaagcagaggcttaagagggtggaaattacagcgaagcaaaaaggttatccggacagcgtagtcggactgctgggaaaaaataaagagactgtggatttcgtggaggactatgaggcgaaaaaggatgttccggcggccgataatatcggagagagttacgtggagggacagatcccgcaattgctgcaatgggacgagcgctggggctatgcttcctacggtaccagcatcgtggcggtaagcggatgcgggccaacctgtatggctatggtagcggcagggcttaataaggatccgtccataacccctgcaaaagtagcggcatacggaacagagaatcattatgtagatgaagataataatacctattgggcgtttatgcgagaggcagggggcaactggaacctgtcctcctatgagggcgttcttacggaagcgcaggtaagcgcggaattggcagcagggcatccgattatctgcagcgtaggacctggggactttacccagaatggacattttatcgtattgaccggatatgagaatggcgttgtcaaggtaaatgatcccttcagcaagaagaacagtgaggcgtcctggatatttaaagacatcgcggaccagatcaaagcgatgtgggtatactctttgaagcaatagatggaaggcagatgctgccttccttttctttgcccgaaaatgatctgccagaatatattcccggcaaatatcacgacaaggaagtttaatcaggggacatcttatccccttttacagggaggctatctggcaattcctgcttattctatccaagaagtaaaagatttgccatatccggcatgtggggcggatatggcaaaatctttcgtgcggtggtattgtcaatattagttgacaatatcagattcttttgcgtctgcttttggtttcatagtccaaaacactacattcattacaatgacaatcagtaacacaactgccatagccacccaaaagccgatattaagaccaagccattcggtagttccgaaaagggtcatccaaagttctttccagttcatcattgcacctccttagagcagttcgccgaaatgacggacataggcttttttcaaacttgttgccagaatcatatacagcagaatacatggaatcagataagcaaagtatgttgcaggcaatgcaacaaatcccagcatagttccaaacacagtaaacggaataatggtcagaaccgtaattcctgtcattgtgagcaaagtcaacggagcggacgcacgactctgaatgaaaggcagcttcggagtacgaatcatgtgaatgaccaacgtctggctccacatagattccacgaaccatccggcttggaacatcccaatatactgggcctgaagttttgccagctctgcaccgctgaaatgggcgggcaaatcattgaacaacacaccgttcgatacgaacaacgggcagaatacaaagtacatgaaaatataggttgtaaaatcgaagatggagctggttggaccaatccagatcataaaacttccaacactggaagcatcccatttacgtggtttggaaatgaactcctcatccacattgtcccaaggaattgccgtgcaggacaggtcgtagatcaggttcaggaagatcaggtgcacgctcatcatcggcaggaacggcagcagcgcagaagccgccagcaccgagaacatattgccgaagttggatgatgcggtcattttaatatacttgatcatgttggcataagttttacgtccctcaatgatgccctgctccaaaaccatcaggtctttttccagcaaaatgatgtcggcagattcctttgccacatccacggcggtatccaccgaaatgccaatgtcggcagctttcatagctgcggcgtcgttgataccgtcacccatgaaaccgaccgtatgaccgttttcacggagaacagaaaccacacgggctttctgatcgggggtcagctttgcaaatacatctgtagactctgccgctcttgcaagttctacatcgctcatgtgttccaaatcagaaccgagaagcatattgcgaaccttcagccccacctgcttacagatggtacgagtcactttgtcgttatcaccagtcaaaatcttggtggtaacaccgtggtctttcaaagccttaatagcatccgcagtagattcttttggaggatctaggaatgccagatatccaatcagcaccatgtcacactcatctttgacaccaaatgcgccaactggggacggattgcttttctgtgcaatcgccagaacgcgaaatcccttgtcgttaagatcatccactgtctcaagaatccggcaacggacgtcatcagtcagaggctgcactcctccatcacactctgcaaacgcacaaatagagagcatttcttccacagcaccttttgttaccatttgggtcttgccctttttatcctgtaccacagtagtcagacggcgacgtgtgaagtcaaaaggaatctcgtctacctttacatagttttcggacaggtcaatgagacgcgaatctgcggcttcttcttcctccgtcttatggataattgccaaatccatcaggtttttatagccagtctggaagtaactattgagataagcgtgacgcagtactcgcgtatcgtcctcgccatttacattcaggtggtattccagcacaaccttatcctgggtcagcgtgccagtcttgtcggtgcagagaatatcaatagcaccgaagttctgaatggaattgaggtttttaacgattgtctgctttttgctcatggaaacagcacctttcgcaagacaggttgttacaatcatcggcagcatttccggtgtcaaaccgacagcaatagaaatgccgaataagaaggcctccaaccagtcgcccttggtgatgccgttaacgaagaacaccagcggaaccatgacgagcataaaacgaatcagcacccaggaaacggcgttaacacccttggtaaagcttgtttcaaccgcttctttggcaactgcggatgccatggagccaaacagagtatgatcgccaacacaaacaacaacagctgttgcgctgccagaaattacattactccccataaaagcaatgtttgtgtaatcggtcacgctctctttctgtgcgctcacactgcgtgttttttcaatgggttcactctcaccagtaagacttgcctgactgacaaacaaatctttcgcatccaagatacgaacatccgccggaaccatgtctccggcagacagatgtacaatatctccaaccaccaaatcatccataggaatttctattttttcctggttcctacgagtaacggtgcaagtggtcgtaatcatggctaacaacttctctgctgcatttccacttctggattcctgaacaaaccgaagcgtacccgaaatgaataccatcgttaaaatgataactaccgtcagacagtcaaaatcctctggcgcactgccaaacagagaaaaataaggtagaatcatatctgtaatggttgataccagtgccaggcaaaacaggatggctgtaaaagggttgataaacgcactggtcagccgttttgccaaggacttctttttttcatgtgttaccttattggtaccatatttggtacggcttacgggtactgcttctgtatctaatccccgaagtgtggtatgaaggtttttcaaaacctccttaatgggattggttgccgcaaattgaatgcggcggttctgttcgtcacgaatgactgtcttttcgacaatctgacgaacagccatgcggttttctttcttgttcattggtcttacctccttgaattttagtagaggcaagggcaatcacatgagcgacacggaacctccgaatccccatgtgctgctctttgccttcttggactaccgtcagagtccatgtctctcacctcactgttttaaaaaatatctatgtgaaaccgcaatgcggattattgattacgatagcggttactctttccgatataccagacatcaaagcctgcaacgattagccatgcagtcatcgcacacacaaaccagtggtttgaaaatcctgaccaaagccccttcatcagaaagataatgccattaagtgcaatgacttccccgatgttacggcaaagcgggataattttaattttatctttctcttcctgcggcatatttttccacgcagaaagatgaatatatccttttccacaggcaaacaagaagcctgcaatagtaaaaagaactccgaaaaagatgcatgtaaagtccatattttctcactccttccaatacttgattttattttttagtttatttagtctcagaaacttctctgtttagagaacatccaacttaaacagccacatattattgtaaacacggagtaaagtgcaaagaaaattgccagtttgtaatctttgattttcgtcttcactcacaacacctcccaaccagcacttacaacttccgggattgccagtgcctgcccaacgattccctctaaaacattgtttttaggttttccgacagaacagtatttcgcaatgatctcaaccttatcaccaacaacatcgccactttccagattattcaggaacagcgttttgcaaggattgctgttaataagcaacagacgaatttcctgctctgcatcttcctggcaagtgaccgaaatacgattttgtttttcagattcatcaccggctgtgattggattcaactttcttgcaagaggtcgcagaatcaagttggagacaatcaaaataccagcggcggtgattgccattgcatacatccctgtacttgcaagaatgccaatggcagctgtacaccatagcgttgccgcagtattcattccacgcactgttccgctgtccttgaaaatcacaccactgcacaaaaaaccaacaccagatataatactgctcccgacacgaaatacctgatccgagccatagagcattggaaacaaggtaaagaaactggttcccatgcaaattaacacattgatacgaatacccgccggatggccggttagctgccgttccaatccaatcagaaagccaagcaccaaggagagggagattcttaaaacaaaatcggtgtaaaacatgtgaatcgcctcccttcgaccacgaacagtatataaaaatcgcaaggaaaatcacatgtctaaaaccttgcgatttccttgcgatttggcaagaatttaggcgggctgaaaccgaaagtagtctcagtccgtctatgttatagttggtcattaaatttgtacccgatgccccagatagtcaaaatgtacttcggcgcatcggggtcaggctcaatcttctttcgcagttttcggacaaatgccatgatgttgctgtcatcaagcagataatcctcttcccagactgcgcgataaatctgctctttagtaaagacctcgccccgattctgagcaagaaaatacagaatgtcaaactcttttggggtcaagctgatttctgaacctttcagcaggacctttctgcttttcggatgaatctctaattctccaattagaatcccgtccgacaaaacaccggcaggcagttctgtttcttctgatgctcccaaaagcaaagaagatacctctccgctgatcagatcccggacgccagacagtaaatcttccacacagtcactttttggcggctctttaatcagcttttccagcagccaaatttcaagggcggaatccatagggataaaactgatattctttttcacgatgaattcctcctttcaaatcaactcctggtacttcttcttatagagatattttgctaccgtagtcaacagcatatacgcaagcgctacgatcagcaaaaatgcaaaataccaaagcggcagcatcgtcaggccgaacagcgatgcaccgctggtaaaggtaatggctgtaaaggcaacgattccggccagcgttatgcaaatcacaggcgtagatgacctgctctgcataaaaggaactttgggtgttcgcagaaaatgcaggatcagcacctgtgtccacatggattccaaaaaccaccccgtctggaacagtgacacatactgaagctgcaaagaaggatctgtaatattcaggtaggttgctcctccacacagcatgggacacaggaaataatacaggaacaggaaggtcgcaatatcaaacaaagagctgatcggcccgaatgacatcataaaccgtcccaaagttttgcccgaccaatctctcggagacagggtttcttcctcgtccacattgtcccaaggcagaacaatacacagaatatcgtacagcagattcagaagcagaatctggatggatgtcatgggcagaaacggcaaaaatgcgctggcgcatatgatggcgaaaatattaccaaagttggagctggcggtgatcttgatgtatttgagcatattggtaaaggtcttgcgcccttccaaaacaccttgttccaggacattgagatccttttgcagcaaaaccacatcggctgcatctttggctgcgtccactgccgtgtccaccgagatgcccacattggcctcgcaaagtgccgggatgtcattgacgccatcaccaaggaaacccaccgagtgaccgttttcccgcagagcggataccagacgcaccttttgacccggagtaagttccgcaaaaacatggatttcctcaactgctgtgcgaagctcactgtctgtcatttcatccagttttgcaccggtcagcacagtctcggcagagatgcccacccgacgacaaacagacaccgcaatggccgcctgatctcccgtcagaatcttaggagccacttttagcctcttgagggccgccacggattcttttgcggtttgcttgggcgcatcaaagaaggacagatagcccaccagagtcatattaaattcgtcagcgggtgtgatctccctttgatggcctacatttttccgtgcgatagcaatgaccttcataccctcctttagcatatcatctaccacagaagatacgctctgcataccatccttttcaatcggcagagtttcaccccgatattctacatggctgcaacgggaaacgatatgcctaatgtcacctttcataatgatctggcactcgccatcgctatctcgcacaagggtgctgacaaacttgcgggcatagtcaaagggaatttcgtccgccttttgatactgggccaaaaggtcggtataatgggtttcacgcccgggcatagtcttacaggcaagaattgcgttgtcaatagtgttgcgaacgccagaatgataggaactgttcagatatgccagatcgagaacttccgtattttcattgccgagaatatccatgtaatattccagcaggatactttcattggttagcgtgccggtcttgtccatgcaaagcacatccatacttccaaagccctgcatggcattgatgtctttgataatcgtttgctttttactcatggcaaggctgcccttggcaaggcaggctgtaatgaccataggcagcatttccggcatcagtccgacggccaccgacagagcgaaagcaaaggactccagccattttccacctgtgataccgaggagcacaaacacaatcggcaccagcactgccatgaagcgaagcatgacccaggcaatggaattggcacccttttgaaaggaatttttgtcgtcagaatcgggctttgtaaaactgccatacagagtgtctttgccgacggccagcacaattccttcgcctttgccgctgataacagttgttgccataaaagcgaggttttcaagctgagtcagcgtcttctgctcgccgtagctgagtttgcggcagctcttttcaaggatggcgctctcgccggtgatggcggcctgggagataaagagatccgtgctcttcgtcaatctgatatccgccggaacacgatcacctgcggagaatagaacgagatccccgaccactaattcttcggtgggtatctccattaactccccatcgcgcctcaccgtgacgctttcatgaatcaggcggtcaagctgagcagcagcgctctttgcccgcagctcctgaatgagacgaatgacaccactaattaggatcatggaaaagatgataatggcagtagtagcgtttctcgcaaaattggatgctacgaaaacatccgtaatgagagaaacaatacccagaacaaaaagaatcacatgaaacgggttaataaatgcccgccgcaatcgttgcatcatcgtatcattttttcgctcattgaaactgttctttccatacttctcccgcatcgactcaatttgctcaatgggcagcccatccggagatgcgccaatgtctcgatagatttccgatggctcacagtaagcgtattttttgatacgactgtcgaatagtgttgcttttgacacgagacagtccctcctttataagtacaagtaagaacattttaacatagtgttatgaaaatgctatgtttatattcttgcttttttcttgcaatttactttgatgcagcaatttcctattgactttttatttgcaggctactactatttgatcgtggatgaaacaggatggaaggacattgccgatttggtcaatctgatctatggaagcatccaactgatcagcgcgcagaaataaatcaatattaaggaggccgaatcgtgatttttcgcatcttgcaggagtggctggaaaagaactgcctcagcgaggcaatagagtatggaagtcacagcaaaggaatggcgagatatacttgcccaaaataaatcatggaggttgcgatgatgcaggagatcttagttctggaagatgaccaggaactggcagaggggatagagatggccctgataagcgatgatctttctttcacgctttgcgggacgattaaggaagcaaagaaaatgcaaagagaaaagaggttcgatttgctgattctggatattaatcttccggatggaagcggactggaactttgcagagagatcaggaggggaagcaaagtgcctatcatgcttctgaccgccagggatatggaactggatatcgtaaagggcctggagtgcggcgcggatgactatatcacgaagcccttcagcctgatggtcctaagggcgcggatccgggcgctgcttcgccggaccataggcgactctaagcaggagtatgtaaaggagccgtttcgtttccgctttgaatccatggaattctataaggatcatatcccggtggaacttagccgcacggaacagaggatcctgtatcttcttgtcactaacgcgggcaggatacttaccagggagcggctgatggagtgggtctggccggatggaacggagtatgtggaagacaatgccctgtccgttggcatccggcgtctgcgggacaaactggaggatagcccctccaagccggaatatataaggaccgtatatgggaagggatacatatggcaggaatcgcgggaatcataattttattactggacgttgccattcttgtgcttgcaagagacggcaggaataagaagaaggagatggaagtcctgcttcaaaggctggatgatgcccttgaaggaggagagggagcatatgcgtatgatgaatctatggattcggcgattgcggaccggctgaacaagctgcttagaagttccagtatgggcaaggaacgggcgtatcaggaccgggacaggataaaatcgttgatttccgatatctcccatcagatccgcacccctctttccaatattatgctgtataccgggctattgcaggaaaagaaactggatgggcaatccaggatgcttgcggatcagatacaggggcaggcagagaaactggatttttttatgaaagaactaattagatcgtcatatatggagacggatatgatcgttgtcagcccgcggacagccccggtgggagaactggtggacagggcctgccaggcagtagaggcggaggcgctgaaaaaggggattttgatcaggcagccggagacggatcggattatctgcaagtttgatatgaaatggactttggaagcagtgaggaatattctggagaatgcgctgaagtattcgccggaaggctcggaggtgcaaatagagatcgctccaaacgaagccttcacctgcatcagcatccaggatgagggcataggaataagagaagaagaacaggggctggtatttgaacggttctaccgttcccgggatgtgaagaaggagccgggaatggggatcggcctttatctagccagagaaattatatccaggcagggagggtatatcgaggcccggtccgagtatgccaaagggacttgcttttgcatctatcttcccaatttttgattggacaccgcaggaatgtgcttcggcacattctttttctgttaaaattgtcacatttgagaaagaattgagaaagaagcatttgctatattatttccaggcgccggatggcgttagtataagttatggaggtatgacatgaacatattggttacagagaacttaaagaagtactacaggatgggggaaaatgtggtaaaggctttggatggcgtcagtatttcgattcagcagggggaattcctggcgatagtaggcaagtccggaagcggcaaatccacgctgcttcatatgctgggaggattggatcggccgacctctgggaaagtcatgatcgaacagaaagatatatcttccatggataaagacgaacttacgatattccgtcggaggaagattggatttgtattccagaattataaccttcttccgctgatgaatgtatatgagaatattgttcttcccatcaagttggacggcatccgtccacagaagaggcatgtcaatgagattatcgaaatgctgggccttggagacaaaaagtctgccatgccctcccaactttccggaggccagcagcagagggtggcgttagcaagggctcttgcagctaagccggctatcgttctggcggacgagcccaccggcaatctggacagcaggaccagccaggatgtgctggggctgatcaagacttccagcgagcgctttgggcagacggtggtaatgattacccataatactgagattgcccagatggcgggcaggatcatccggatggaagatgggaagatccgcggaggtggcaaggcttatgacgaagattaataatagaaaggtgatatctcagattgccgccacgacctataaggcaaataaaaagaggaatgtgcttacaatatttgccatcatacttaccacattcctgatcggcgtggtattcgctgtcggcatgagttactggaataccatatcccttcgccagatgcgtatgagcgggatggattacgacattgaattgactgagcctgaacaatcccaggttaagatcatccgtgccatggataaagtagaggcggcgggagtaactgtcaaatgcgcgattgcagaaaagtacgaagataaggaactggataaggttcagttatactggatggatcagacagcatgggagaaacaatgtattcctgcgcttgagtcccatgaagggacctatccaaagaaaaagagtgagattatgctgtcgaccgacgccttacatgctatggggatcacaaatccaaaaccgggaatggcgatcacgctggaatatttcacgctgtcagatgagaatgaaacacaggaatctgagcaagaagaatttatcctgtccggctggtttcgggattattccggaagatccagagggcttgtatcccgggaattctatgacagatccggggcgagccagacggatctgacccagggagaactgctgattaccttgaaaagtcccatatattccaagaaagacattgtggatatgcaaaatgccatctcccttggtaagatgcagtcgctgcttgctgactatgacacgatttccaactttttgaagacagcagccattctgctggggataatggcgatgctcctgcttagcggctatctttttatctataatatgctgtatatatcaatctcaaaggatatccgatactatgggcagttaaaaaccattggcatgacatccgggcagatgaagcggatgattacaaaggaggtcgtatggaactgcgccatagggataccgctgggactgctgcttagcctgatcgtttctaaaggcgtgatcctgcagatcctgcaaatcgtgaatcctactttagatccggcggaaatcaccgttatcaagccatggatctatctactggctgcggcctttgcgttccttacgaaccaggcaggcagcaggaagcccgcaaagatcgctggagattgctcgccggtggaggcaatgcgctatattccagaatcaggaaagagaaaaaagggaagagaaagggatgccgggataggcgctatggctgtccggaatatcacccgtgataagaagcaggcggtagtcatctacgcttcttttattgtggcagtgaccgtctttctcattatgaatgtcgtggtaaaggagaatgatgccaagtctatcttgaatgccacttacaattatgacatacgattcaagaatgagactacgttggatgaccaaaagcccttgcttacgaaagaaaagatccaggcgatctgcaagataagcggggttaagagcgtagaaagcgtgacatccacagaagcggttgttccataccagaaagaggtctatggagaattctataaagaactgtaccagtctagatacacgccgggcggagattatgaagaagatatggaatcctaccaaaataatcctgcaggcagccggtttacgacgcggcttgtagggattgaccagacggaatttcaaagaataaataagaaactggggaatgtgctggatgaagaggaattccgggaaggaaagatcataattttaaatgactttctgcagattgatatgggcgatgtgatcggaaagacggttgcgttcaccctcccggacggccttcggccaagccgggaggagaaagtgcggattgcggcaatcagccaagactcccctgcttatttcgccgggggctataatccggtcatgatggtgagccaggagtatatgaacaccctcatgggagagccattctgcgaactgattcaggtaacatatgacgagacattttccgggaaaacggagaaagaagtgaaacaagtatttgaaggtgagaagcagattacctatgattcaaaactggaacgctattcagagatgaaaagaacagagacacaggtaaaggtattgggaaacagtgttgcggctattatggcgctgctggccgcgcttaactactttaatatgatggccgccagcgtgcagaaccgttccagggaatttgccacgttagaaagcattggaatgacatctgggcagatcaggaaaatgctggtcctggaagggagcggatatgcagtggtatcgatcatcatatccgttatcctggggcttcctttaagtcatgccgtgtttgagggaatgaatatctacaggattgactattccatgccatggccaggcaatctccttttgtttgccggaatccttattctgtgcatgaccgttccggcggccatctatcagcggacgcaaaaaaacagtatcatcgagcggcttttgtgctaagatatagtcaagcataacaggaggaggattacagatgatcagaatagaaaaagaaagatgtattggctgcggcgcatgtataaaggactgccctgcatcggcaatcaggatgacggaagaaaaggcggaggcgtataaagactgcctgctctgcggtcactgcgtcgccatatgcccgtcggaggcagtctctatcccggagtacgatatggaagatgtagaagcatatgacaaagacacatttacgctgaaagcggaacattatcttcatgcggtaaagttccgcagaagcatccgcaacttcaagccggaaaagattgagcgcgagaaggcagaaaggatactaaaggccggccgctatactgccaccgccaagaaccggcaggcgtgtacatacgtatttatccaggagcagctagacgagttcaaggaacttgtctggaaggaaatgccgtctatattggaggaactcaagcaaaatgccccggattacgccagagcattcgaactcttttacctaaaatggaagaggaaccccaaggacgatacgttctttttcaatacgcccgcctttcttgtcatcgcctccaataatcctttagatggagggctggcggcagccaacatagagaacatggctgtggcggaaggacttggcgcgctgtacagcggctatatgatgcgggtgataggattaagccagacgctgcgggaatggcttggaataggggagaagagagtatcctgctgcatgctcctgggctatcccgctgtatcatacagaaggacagcacccaggaaatatgcagatattctctggaaatagatagaatctatatccatcagccttagaattacagaagccggaatgcctgttctacagaagcgcgcatattctcccgggcgcgctccggcttcatggcttcctcaagcgtggtaacgccgcggacgatggggaagaacgcgtcaataccagcctgattgcaggaggcagcgtccttggttacgcttccggcaaaggcaaggactttcacgttatactttttggccagcctggcaactccgacaggagcctttcccatggcggtctggtgatccagacggccttctccggtgacggccacatccgcgtctcttaactcttcttccaaccccacagcgtccagaatcaggtcgattcccggggtaagtcttgcattcaggaaactcaggaaggcaaagccaaggctgccggctgctccggcgccttctgtttctgcataactgcagccgaaggtatcggcggttatctgcgcatagtgggtcattgcctgatccagggcgtctttctgttcctcagtcacgcctttttgaggcccatagatgtaggttgcgccgctcttgccgcagagcgggtttgttacgtcacatgctacctggaaggtgcattcggccagcctcggattttttttagcgctgttgatggcagcaactttggagagcgcctgcgcaccttcgcccacatcatttccctgactgtcgagaaagacgaacccaagggccttaagcatgccgatgccgccgtcattggtggcgcttccgccgattccgattataaagttccggcatccctttgtgatagcatcgttgatcatctcgcctacgccgtaggtggtggcagacaaggggtcctgcctgtccgtgggaacaagcgtgattccggcggcagaagccatctcgatgatggcggttttcgtttcttccaagtatccgtaatatgcatgaacctttgttcccataggcccggtgatcgtaagatcgacgcgctcgcctttcattccttcgatcaaggcatccgtggtgccctctccaccgtcagccaggggctttacaatgacttttgcatccggcttggcggcaaggattccctcctcgactgcaataccggcttccatggaagtcaggcttccttttaaggaatccattgctacaacaactttcatttctttgaacctcccgtgtctgttatccatttcgttactttgttaaggcgagtatagcacattagagtcaaatggaaaatgttccttgggacaaaaataagccgatttagttgcgaaatatgttatataggacaatattcccgcgaacactcatccaggtatcgtatactcaaatccgctgatccggtggatgcggtcaagtttatactgcagcgtatttttgtgaagaaatagtttctcgcttgtctgtaacagggaccgcgttttagccagaaacgcttccttgcttctgtgctgaggatcggcagaacgtgggagtctatggtgtaacagcagctggaaaatcctattttctgcctgcctgctgtgtggaagcctgcaggctgaattatcgctgtaaattcgtagactattgtgatctgttggatgaattgattgttcttaatcgtctggaagatctgagccgttacagaaaacggattcggtattatgccagaatacagcttctgtttatagatgactttgcaatcagtcgttactctgaggaataacaactggttatatagttcttatagagcgctcatagccagtataaatttatccagaggagcaaaatacgcttctctggaataaaagaaagcgaccgttgaagatggccctgactggccggaaaaagcggcctgagtggccgctaaatacggctatttgcatttttctgtaatgctgttgactttgttgtatgaaatgagtataatatggttagaatattactaccactaattcaaggaggtgtcgttatgaatattcgtccatccgcagcaatcagacagaattacaacgagattgccgatatgtgcagaaaaaccgcagagccgattttccttaccaagaatggcgagggagatttggttgttatggatattgaaacctataaccgcagggaaaagatgttaaaactccgtgaggaattgcttgcggttgaggaggacaggatgcacggcagcacgggatattctgtcggggaagtcgctgccatgatgcgtagtgcaatcaaggaggcggcaggccatggaaaaacagaataggtatcgtgttatcgtgtcagaacgggcgacacagatgcttgtttctcatgctgcatttctggcgcaagtcagtccagaagaggcagaaaggctgacggcagaatttgaaaagacagcaaattcactagaaaccatgccgcagagatgtccgtggctcacaggggaatatatcccaagaaacgcctatcgctttatcctgtttgagaaacggtatatgataatcttccaaatcgtagatgatattgtctatgcggattatgtagtggattgcaggcaggattacagttggctcatacggtaacaacagaataaccagaacggaaatcgtcacttaaaacaggtggcgatttttcttataggaaattccgattttaaggaatagaaaaaaaggacaagagtttaccgaatatattagataaactcttgtctgggtatgacgatgagacgacacggcttagaagatataaaaaccttccacgccagcctcgtcatcaaataagtcgtcttcatttaagaaataatcctgtgcacttgtattgccaatgcctgttatatcctggattgtacttatttgtatggatagaaacagaagcactattacacgaatgtttttaagagttatcaaacaaattaaattaatggattttcaaaaaaattgaaagaatattctaaatattatatacttttattgcaaattattgtataatatctcgtatattaaaatgaggggcgtgatatgtatggcaaaatagaactggaatgtgataagaaactataaacttactaagtctttcatttaaacccgatattggaagaaaggcgtgcatatgcgtaagaaagtatttagaattttatgtatcattttttcggcaggggtttttatgtctgttttttatccgtggacggtgctgaatggtgaaagctatactattatagagttctataaacaagcagtttttgacaaacaattatataccatggcagatatgggaggaagcgtttatcttcttctgatatttttgatttttcctatggtggtagggattctttctggagtcaaagcagtattgctggtattcaggaaaaattactatttgttgggagaaatcattaatatatcagaattgatcagcgttgccgccttttttgcatttcaaggatatgaattgttaacagctcctttttttcaagcaatttttgtatttcttgaatttatgatggaatgctatttgtcggatgttgatcgttttactaatgaatgggaaattcataagattaaaaatcggacggaaaaagaagagaggaaacagagacttgcatttcccgggaattatgatagaaggttacgaaaaattattcgaaaagatgcattacatccttcgaaggcggttgttttagtatgcatcggtaatggaatccttctcgggtcagcatttgctttatttgcagtgaaagaacaatttcagaaaaactatagcgcaaaggctgttcttcctacggaggggctaaatggaattttgaccaatggacttctggttattactattttttatatcttttttgcaatagcagcattttttaattatgtccataatcatcaagaaagaagaaatttgttctggactttgggaagtagagaaagacttaatagtattgcatggaaaatggaatatgagtttatgattgtattgtcaatgattccgggctatatcattggtgtaggaatttacaatctattaagggtgatgttgaaaaaggaacttggtgtattgatagatggaaggactcaacttcagctttactttttatcaggattattatatctatgtttatcgggagtaattatttggctttcatcaattttgttgcgaaaggaattgcggggagaaaaaagaaatatcaggaaactttcgactcctacgaaaggtgttgctgtaattacggttatgctatcgttaggctatctggtcttttctatcggaagatatatgcagagaagaaatggggaaagtttaaacatctttgtgtatggtattatattaggtggtatatgcgttttatgttccattcgacttttggagagtttgaatagaagaggaaaagcgcaaaactttcaagtacttttagataaaattcctatacaaagcggtttttttaaagaagcaggccttcaatctgtggtttttgctttccattttattttcttaggatttttgtctgtaactatggccggaaaactttcagcaccttcaccggacacattgtttccgcatgagtatgtttgtatggcgtatccagaagatgaagaattattcacagaattgagagataaaaatctggcagatgtaaagtcatatccgatgatcagggttacatccgtacagggaaatcctacggattggatcgatattgctaataactattatcgtaaaattatctggcctcagggacagcatataggaatctccagaagtacttatgaaagcttatgtacagatgaaaaaaagaatatatccaacttcacattgtctgaagatgaaatttatgtagtttatcaggaagattgttctgtaaaggcccatcctttggagtggtatatgaatagaaggacaccttttatcaaagaagggcagccgcttcgttggtataatccttttgctagagaaaattattatccgccaagaaaagtgattgggcaggagagaaaagttttaacgggagtatttgaaagaggaatccaagaacatattgttgtattttcagacgattactttaatcagctgcatgatgtggacgggccatccgttttgtacttcgttgattgtctagagaaaaacaaaaaagaagtagagaaagtactttctgtttttgcatctaggcatatggaagattcctcatgggatcgtttaattcaaccttattacagcaaaacagaaaagattacagatatggaagcagagaggaaattagaacaaatatcaacttcgatagagatgttattatcagttttttgtgtatttattttctgttttataaaaatagaatttgaacaggaagagaaacaaaagagatttcagacattattttgtctcggaatgcataaaaaacaagtcaaacacagtctatggagagaaatttgtcggtttatattgctgccattgatttttgcatatactcttgcaactgtagttgtaacttttatatggaaaatgcgatttgtaacgggagcagaaagtagaaaactctggatgactcttattattatttggacaatatatcttttgttgcaaatgctgttaactttcgtattgtaccggtatcaattaaataatttgaatctgaaaaatggcgtgagggggagaagaagatgaagattgaattgaaagacatcaaaaaatcatatcaaattcccggacaagatgaatttaaagtattgaaaggaatcaattttttaatttctcagggagaatatatttcaattatcggacgctctggttgcggaaaaactactttattaaaaatagttggtttattggacataccaaccgaaggagatgtaattattgatggcgtaaaagaaaaagaattgtggaatgatgaattggcagatcttcgtagaagaaaacttggatttatatttcaagactattttcttttggaacatctcacggtacttgataatatgattttgccagctcttttggataaggcagaggagaaaaagtcattagagcgtgcggaagaattagcaaattatttacagattgacaataggctattgcttaaataccctaaagaactttcaggtggcgagaagcaaagggtcgcaattgcaagggcgctgtttaatgatccggatatccttttggcggatgagccctcagggaatctggacgaacagtctaagaaaaatgtagaaaaaatatttaaagatctccatgaaaatataaataagtcaattcttttagtgacacatgatttggaatttgccaagtggagtgaaaaatgttatcagttacaaaacggggtgttggttaaaggataaatataaataaggagataagaatgtgatagaaaagccatttattcacttgtttaaaactacaaaaggtcaatattgttatgatgttaataaagatgaaatcatacaattgccagatgatgtttatatgtatttagctgggaaaggagaaaaaacagattatgtaaaaacttatatagaacagttgtacgaaaggggctatttaaagtcaaaacgagttataacaactaaacatcctgcaaccgattacttgtcttattattatgacacaaaattaaatttcttaattttacaagtaacacaaaattgtaatttgagatgtgaatattgcgtgtattccggaaattatcgaacacggtctcacaacaataaaaggatgtcattgatttagctcaaaaaggaatagattttttgtatcaacattctagagaaagtacaagaattataattggattttatggaggcgaacctttattaaaatttgatttaatcaaaaaatgtgctttttatatagaaaaattgttttatggggaaaaaagtaatatttacaattacaacaaacgcaacattattaaaagagtctattgtagaattttttgtagaaaaaattaatggagaatttaagatatataagaaaacattattgtcaattttataaaaataatattagttttaatacaagtatgaaaaagaattttttgattggttgatagaaaattatgattgtgctacactaaattcaagcagatattttttttgaaaaaagaaagaagtgattaagatgtgcataaatgaaaaaaggaaaaatgatgttttcctccatgcaaagccagtagattgcgacatttgcatggagtaatcatagtcgcagaatagaaatgctggctttgctacttgactatcacatcaaggaggaaagtccgcatgaagtattttaatgcaaaactgattcttccagacgcattggtaaaagaattacagaattatgttcaaggtggatatatctatgttcctatcgaacaggagcagcaaaagcgttggggagaagtttccggctatcggcaagaattggaacaacggaatgagcaaataaaaagagagtatcagaatggcatttctatggaatgcctgtctgaaaaatatggtttatctttctatgctgttcggaaaattatatatcagaaataaccgtaaggggctgtgttttacagcctcttattttatacagattggtttgtactgtatggtgtatagaatctctaccataatggcgataaaataaaagaaagacataagaaagttttatgaaaggtgaatgttatgtgtactagatttgtttatcgtggagatgatatgattacagggttcaattttgatattgacctctctgtatggaaacataaagtgattgaagaaaaggagcgtttctatatcggaattttgcgaccagatggaacgtatcattcttatcatggagttaataaaaatggaaatgttgggacgttattatatgtacatggaaaccctgccggagcatatcaagactgcccaaactgtatgacgattgcagatttgacggagcagtttatcaaagcacagatttcttttgatgaagtgcttcaaattttaaagtcaaagaggattacctatgcgccggacgctactatgcaggcgatgttatcagatgtttatggacgcgtgttgataatcgagccggggattggatattgggaagaacataaaagatattccttaataacgaattactctttgatgaatccggaaagtacaaaaaattttattgtgcagggcgataaccgatacgaaagagctttgcaattattagacagctataaaaatgatttttcaatctctgacgcatttgcattgcttcatactgttcggcaagagggtgaatgggctactagagtttcatttgtttactctgtgaaagaacaggcagtatggtatgcagagaataaccactttgaacatattacaaagtttgtgtttccgtcagagcagcaggaaaggagtagtcatgcagcagaaaatctatcctcgttcaaaggataaagaaacggtttatctgcaaaatgttattaccaatcctaatatcatagttggagattatacgatatataacgattttgtcagagaaccaagagattttgaaaagaacaatgttttgtaccaatatccagttaataaagataaactgataatcggaaaattttgttccatagcatgcggagcaaaatttattttcaatagcgcaaatcatacgttatcttccttgtcaacctacccatttcctatcttttttgaagaatggggattagatgtaaggaatattacgaaagcatgggataacaaggggaatattgttattgggaatgatgtttggattggttatgaagcggtcattttatcaggcgttacgattggtgacggtgcaattattggaacgcgtgcagttgttacgaaagatgttccaccttatacaatcgttggcggtgtacctgcacagacgataagaaagcgcttttcacaagatacgattgacactttgttaaaaataaaatggtgggattggtctaaggagcgtattacgcaacatatatccgagatacagtcgggaaatattgaacatctgatatgaattgccggacgacggcaaaagaaaaaagccgtcgtacagcagatattttcatgcgtctatgaagcggtggctttgattttcagagccgccgcttctttgcgtttactcattatattctgaaaaactacggcggtattgaggaagtgctgtcgtacccgtttttttgcttacatggtgctcttaatttatcaaaaaactgtatctgcaacagactaagtatgcctagcaaatcatttagtgtgtgtttgtatcgaataatcttcaaatacccatgagtttttctattgtataggtatttgttgcaataatccttactgggaagaaagggggtgaaacaatgaacgattcagagcaatacaaagagcatatcgagtacacttttgcagccttttgtaaagttgttctccgcaatgcttccctgtctgcttatcgggatattgccaggcgtcagaaacgggaaatatcccttgattatctcatggagggaaggtattacaatccgtctacaacagacagctattttgcgaagcaaacaagttcgatggaattgattgtgtgcggcgagagaatcgtaatagaaaatgaacgattggcaaaagtattttccggtttacccaagctgcggcaggaagttttggtactgtattttttctttggatatacggataagaaaatcggagaaatgtatgggaaaagccgcacgacagtaaactactggaaaattgcagcacttaaatatctaagaaaagaaatggagtgtaaattacggttgaatggggatgtcggttaataccgatttttaaactctaaatcctaaaataagaatctcccataaaaatcagtgtttttcatacttgatattctgtgggagattcttattgttctttttctgtatatattttagggcgcaaaacacccataactgcatttttgaacatgcacattttttaagccgtcttttcctcggtttttccttcgaattttttaatctcttcatgaagaaaacgatgatatttattcatgttccgaccaatggcatacagcatgaattctttatacaccttctctgacgttcggtagttgaatcttcggaaactatcattttccttgatatctccaaaatgtccttctgtctggatggaacggatctgacgatttagactccctttctcactttggatgtttgcatgggattcctctttcaatgtttcccattgttcattgatcttcataactttgtttttctcagcatctttttctgcgttatatttatataagcatttcgctttgtgttcacaaccactacagtctgcacatccgtatacctcaaaagtctgggtataacccggctgttttttggtctctgtgcggatatgatgcaatcctcttccgtcatgacaaacataataccgttcatcctcaaatatctgtgttttcatgttgtaatattttccaatatcttctctgtaagcgcgtgttttccgtttttcatgatcctgcagcttgatgtaactggatatcttatttttctttaaatacagaagatttttctcgctacaataaccgctatctgcggttacttcttccaaaatctccccaaatgcatttttatgcttttctaaaaccggaatcagtgtgttatagtctgtccggtcattgcttacataagcatggacaatgaaataattctctactgcgatctgaacattatatgcggcttttaactgtccgttcagcatgtgatcttctttcattctcataaaggtggcttctaaatctgttttggaatagctgttcctgtcctttcccatgatctcaaaacattctttgtatcccataaggcgtttgccgcaggtttctaattcctcataaagctgctggagctccgatttcctcttcccttttccgtaaacaaacgcaatctgttccttctctgcgatctgagtcagatttttctgaagtttcaaaatctccaatggggaacagttgtcaatctcgatgatcgtattattggacaactttttatgttttgtcagttttcgcttccggttcttttcaatgacatctcttaccttatccattccttcgatcacaaacatatgtgcatggggaatgtcatattttatgccatactcattttcatctatccatgcattatacttctgatacagtgaatcaatcatatcgagtaagcctgcgagatgataattgatcgtccctctccacacaaatgtatagcggtttgcattggcctctatttttgttccatcaataaaaagggatttcaatgtgatcagtccttctttttgcaggcggcggagaaactggtaattcaactcatccaatacatctgcagtcagtcttttattcttgaactcataaaaagcatccctttttggtttctgacctttggtaagccagataaatgcaaggtctctttcgcataattccacaatacggtcaacagctctaatcccacgcatgtttgcgtaagtaactacggcatacatcataattgggttatacccggttcttcccttatctgaacaattggccaacaagccagaaaaatctaattcctccatcacttttttcagggtatagactggatcgtcgtcaggtaaacacaattcgaagaaactgaagttaattttctgttgccctaattcaaaaaattcgttataatacttattgtttagcatagttacattataacatgtaacggagaagagatggttgtcgttagccatctttttctcttttatggaaaaatttcaggggcagatgtgacctggtatgagtcacatctgcccctatttggaactatctatttcccgatagccccttgatagcgttagtaaattaaaataaagtgtcttatatatagtatatagggactttataatagaaatcttacaaatatgaataaatccatgtcctaaaaatatacatttcatggaaaatataatgcaaaaaaatattaatatgatacaatcaagataagcgagaagcaaggaattctatgacggcaagaatttcatcttgcttttgcgttgggaattttttgatattaatttcaattttttgagaaatagaatcaacttcttctgtttgataattaattaaaagatcgcagaaaatttcttgacgagtcacatgaagcgcatctgcaatttcacaggcaaaatctactgtgagagaagaagaaccattttcaatacgacttataaaactaggagaaacatgaagtttttcggcaagttgattttgagtaataccttgagccttgcgaatttcctggatacgttgtcctgttttcataatggcattcatctcctttctttgctatatattgtaacaataatagtaatagaaatgaatttacatatatgcaaactatttacaaatagtaaatacgactgtactattaaggaaaaggaggtacggttgaatgttttataataaggttgaagtaaaagccattattcttgcagtttataatattgaatcattgggattaaatagtagtagaattttgttgaagagtattgtttggttgtgtaaacaatatgagactacgaaagagaatttatatctagagaaagcaatgtggcatatatatgcatatttagaattaggttattcatatgaaactggagaaagagaatttaatatagtattggagtatttacaactgaacagagcggatatttttcctaaaagagagtgggaatataaaaagatcactttaaccaaggctaatgtgaatcgcttattagggaaatggaacccatattttcaatcaatgaaaattaatgatgcagttgcagatattataaagaaagttcaggataaagaatatgggaaatatatttatcattgtgggaaagcaatagaagaatgtgaagaaaatacgttatgggaaaaaacttttattctgtatgtaacaaaagatgaggcaattcttcaagatatgaataagagtaaatattatatgcttaaggagatacaacatgattagaattgcaactatcggaggtagtatattgggcgtgaatcgatgtgtttttttctctagttaaatatttctttttgttaatgtaatgattgttctgtgtgtgagaatggggagatgagaaaatattaattgcaggagtaactcttttattttttttagttaatgcaacaacagatatgattgctgcaagtgcatgttttgttgataaaaggctttttaatttgcaattcgaggtcatattcttataatttaagggcaaaagaaagataagatgttataaatatgttatattataaatatcggaaagaaattaaaaaaaatgtgcgtaatcttattggaagagggactcctggtttttcagtgtatgaaaattaatgatcttattggtaaaataggaaatcatgaagagagagtacctatccattaagttgtgtataaccagaatgagtatacattttatgatgttgtaaaaataaatactatatttttgaggaaaaaagtgaaaatgattaaaatagctataatagatgatgaagaaaatatattaaatattgttgaaaatattgtgaaaaaagcaatggaaaataaaatagaaatatatacatatctaagtgtgaaaaaattttggactgattttgaagagaaaatggattttgacatagtgatttcagatgttgagatgccggaaattggtggaattgaattagggaaaaggataaaggggaaaaagtcagatatatatttgatatatttaacatcttactctatgtatgcagttcagagttatgaaatagaagcatatcagtatatattaaaagaaaatatgcagtatagacttccaatagtgctcagttcactgattaataaatttgaaaaagataaagataaatttaggtttataggaagtcctatgaataaagaaaaaatatattataaagaaattatatatatgtgtaaagaaaaaacatctaagtatgtacgtttcgtgacaacaagaggaatatataaagaacggataacattaacacagattataaaagaattaggaagtgcagaattccttttaacagaacgaggttatgtagtcaatgttaatcacttggatggaataaaggaaaatttgattactatggataatggagaacaaattattataagtagatctaatttgaaaagagtgaaagagcaaattaatttatatagaggaagattgtagaagtgtattatgatgaagatgatacaaatgtggattgcattttttgaaatatggttatgctaccaatttttgtatgctacaattttagaaccaaaacttttaactaaaaaaaatagattattcgtaaatttgaatattataattgtaggactcttattaagtataaatagggaaattctgtttttttcctatagtatgatgatattttgtgcattggtaatatgtattaatctattttttatagttaaaaaaaatccttttttaattacgaatctcgtgtttctctattttttaggtacatctttgttggacttattgtttagtttttgggggatgatatttttacaaacagaatttgaagaggcagtttattggtatgcaaactcttattggaaaattggaattttattgtgtacaagaagtataacaggaataatagttttttctcttggaaaaagtagagatagagaaatagatatcagagaatttcaaaatattattttatcagcgaatcttgtgttatttgtggttatgagaggatatcaatttgttttggtaaacatgtcaaatggtatattacaaatgcgaggagatattactagtttttctcttttaatcatcattgttattgtaatatttgttagtagggcttttgtgaaaagcaagatgttacaaaagcaaaatgaaatgctaaagatgagagaaaaattaaaagaacaaagttatcaagagttgctatgtgttttagaacaaaatcgccaattaatacatgatataaaaaatcatatgattatacttcaaagtcaagagagaacctatgattacgaagggattgctaactatgcaaaagaacttgaaaaagtttttttgagaacaacagaagaaatatggacaggaaataaagtggttgatttaatattgagacaaaaaaaatatttggcagaagaacgcaacatagagttttttattgaaacgatttttttaccccaatggcccttcaaggatagtgaattatgttcattgtttggaaatttattagataattcgatagaggcatgtgaaaaaataaaaaaaggaaagcgatggattaaagtacaagtagagaaacagaacaggttattatttttagatatatccaattccatagaagaaaaaatattagtgcgaggaggtaaattaataactaataaaaaggataaagcaaatcatggatatgggttaaaagggatcgaaagaattgtaaataagtatgaaggagaaatgtcttatcaagtaaagggaaatctgtttaaaattattattacattttttctaaaataatttttatagtatgaaaggaggttaggatacaatgcaagaaaagcaagaacattatttggcaggagatttggaagtggagttagaggaatttaaaagtcttgcacaaaatgaggagtatgcagaagggtttttatccacaacgatcaaatgtggaacatttttaactatttattgttgctaaaggaaaaggtagagtgttttacactctgccttttatgatgatgttaaatgattacggaggataatatggagaagtatagtacttatttatcagaacgtaaatatttatctctaaacgaatatgagattgatatttataaagaaatatattggaaaaagatgttaggggatacaatatatgaaaaagttttaacttatcaaaaaaatataaacgattatttgagcggaagaacgtttgatattgaaacattagaagtgaaatgtgaagagaaattactcgattatttgaaaaaagaagatgataacagagagggtgaatttagacataagatatattttaaggaatttttttcccgagttacaaattatggacttactaaacttaaaaaaagtgtaaaaagggaagtttttactgcaaagaatttacaagattttagggaacaattagccatacagttacaaactgtttgtataagaacattaattacacgtttgcacgtctataaggaaaaagaaaaattaagaggtgaaacaccgataaaggaatataattatttttgcgaaaaatatgtttctacatttgaatttgttcatgaattgtttgaaatatatcccgtattatatagaattatagaagaaaaaatagaaaattttataaaatattatatagagatttttgatttttttgaaaaagataagaacaaaatcggagaaaaaatatgtggcggaaaattggtgaaaaggatagaagaaatagatttttctctttctgattctcataagagcggaaagagggtggcgaaacttaaattggataatggaatgtggatattatataaaccaagagctatgaaaaatgatgaaatatatatgcaattaattcaatggataagccatcatattggaatgaaacagtatgaatatccttttttaacatatgaggaacatagttggacatatattgttgagcagagttcctgcaattcagaaaaagagttagaaaactattacgtgagattcggaatacatctttttttaacatatttgttgggggcgcaagatttacattatgagaatataattgcagcaggtgaatatccggtaattattgatttggaagctttatctggaattccaagaaaactaaagggaagatccatagatgaaataatatatcatcaattagtagaatcggtatggaatacgggattactcccattttgttgggggacacaaagaagaaaaggggtagagtgtagtgggataaatggtaaaggtggacagaaatatttatttaagattccggttgttgcagaaggtgggacatcaaatatgcatatagaatatatgtgccctatttccgaagaaaagcaaaatttacccaaaataaaagagggatttatagatatatcacattataaagcgaaaataaaagaaggattttgtaaagcgtatcatattgcattacagagaaaacaagaattatattgttgggtgacaaaactaaaaaattgtgaatgtcgttgttttatggaagatacacaacgctatgggatgcttttgtttagttcctatcatccccaattattaaaagatggggcagaaagagaaattttccttcaggctatgtgggataatagaaataaaaatgattacctaatcgttgatagtgaagtgaaggaattactgagaggggatattccatttttttcatttcatatggattctaaaaatctgctattggggaatggtggagtgatttctaattattttatgaatacaccaatggaattattatatcaaaaagtacggttgttgaatataaaggatatggaaaaacaatgtgaatatatagacatttcttttgacatactacaagcaccaaaacaacagtgtgtaaataaagtgtataagacttgtgagaaaaaggttgattgtagtgttgtagaacggaataatacagcaaatagcaaacttgtggatatgtatattgagagattattaaaatataaggtttttaattatgataatacagaaattagttggtatacaattcaacttgaagatcaatatggatggagtgttaaaacaatgaatatatatttatacgatggtttagcaggtatgttcttaataagttgttttttgcaaaaatatcaaaatactcgtgaaattgccaagataaataaaatattacaatccacattatttcattatacagaaaagggctatgagtcgatgaaaaatcttcaatcccaaaatgtcggtgcatatgaaggggaaagttctatattattaacatatcttattgcatatcaatacaaaaaggaaaagatatatttagattatgctaaaaaacatataaaaataattgagcagttgatacagatggatacaaattatgatgttcttaaggggaatgccggcgctgttttggtgcttttaaaactatatggtatatgccctgaaaaaaaatatttagtattagcagaaaaagcagtagataggttacaggaaagagcattaaatttagagcatggagtaggttgggaaatcgaaaaacaagtgccgatggcaggaatggcacatgggaatagtggaattttgatggcctttgtagggatgtggaagaaaacaaataaaagtaaatattttgaatttgcaaaaaaaatattagattatgaagattttttatatgatccttcgatgggaaactggaaagatatgcgaacacatgagtgcatacaggataacgtgggagctatagcatggtgtcatggagtgtcggggatactgtggtcaagaatgtattgctatgctcaaaatacagataccatttggagagaacgtattaaaacagacatgtttcgagcatatcagaaattggtgaaatattggagaagagatagttggtctttatgccatggaaattgcgggaatttgttggttttagaaaaggcaaaaacattttttgaagaatgttcaattaatgaaaaatatatttttatgaaagaagatattacattgttaccacaagaaaaaatgaatccaggtttatttaatggttatggaggtattatatattatatgttgaaaatgcaggacaagaatataccagatattttcttataaataaccaataatggtcaatatatatacttgagggtcaaagtcttgaaataaataccttaaatagttagagtataattataatcgattataaaaaaaatatggaaggaggagctaatatgaaaacaccaaaaattgtagctagaggatggacttgtgtgggatgtgcgggttgtacagcgtgttgggcaagcgcaactgcaataagtcatgtatcagcagctaatatatttggatagattaaacgcgacaatgttaaataaagatttacattgtcgcgtatttaaaaataattgtattatttagggagaaaaattatgaaagaatatttgttttgggacgatgaaattttaattgaatcaataaatgctgatattatttgtttatacgttttcaaagggaaagaagtagaaaaaagaatgattaataatatagcaaaagaaattattcttagaattaatggcatgcatacatttgatgatatagtaaagtatttttcgcaaaaatacgagacaagtatagaagaagttgaagggaaattagttccttttcttgaagaattagaagaagagtatggactgagtattcggactagttcacatcctaaagagaaaaaggtcaaagaaaaacaacagaatttgtatccgcatgtagcatcgttagaaattactcataaatgtaatcttaagtgtttacattgttatgggagttttgattgtttaaatcagaaaagtatgccaatagaacggataaagaaattacttaaggatttaaacgatattggaacatgggttattgaacttacgggaggagagtgcttgattcatcctcaatttaaagaaattttgctatatgccctttcgttagactttgttcatattaacatattgacaaatggcgttgcattaaccaaagagataaaagatattattatatgtaataaagatagggtgtttgtacaaattgatatacatagtttggaggatgaatatttagagtggtttacaggtgcaaaaaatatagcagaaatagttaaaagcaatgtgagagagctcgcaggcgaaaatgttaaaatgagaattgcaacaactgtaactaaaagaaatatagatgaagtggaaaaaatagcagattgggtatattctctcggaataaaaatgtatgtcccatcttcggttatagaattaggaagggctgtgtactctgaaccagatatattattagatcaagaaatgcagataaagttgtttaaaacaatagataggattaatgaaaaatacgatggatttataaatactctaaacagtgatgaatttagacagagttccaattgtggttgtttatcttcacacgttactattgctgcgacaggagatataaaaatatgcacaatggataccggagaatatacaggttatcaatggggaaatgtttttgaacagaatataaaaaatatatatgatgaaaaacaaagtgaattcataatattttcggaattagaagcaccaaacgcattgtcagaggagtgtcgtgagtgtgaaaaaaggtttttttgctcatcatgcatattaagaggaattgtggcagggaaagagaagggtgaaaaatgtaaatggataaaaaatatgccatttgtgtaaaaattaaaagaagtaaacagatagcatagaggaagaaaggatatgttaagtgtaaaaaatttaaaaaaggaatacgataaattcaaaattgataaagttagtttttcggttgaacgtgggaaaattacagggcttattggaaataatggggcggggaaaacaaccgtattgaaatgtgtgataggagttctacaatatgatttcggggaaataattattgacgggttaatgcttgaacatcatgaggaagagtacaaagaaaaaataggaatagtatttgatagtggatatttttatgaaaatttaacgttggaagaaatgaaaaaaattatttcagcagcctatcagaactgggatgaagaagtatatcaaggatatttaaagaaatataagctggattcaaaacaaaaaatagaaacgctttctcaaggaatgaaaatgaaatacgctttagcacttgcgctatctcataatgcagaaattttaatatttgacgaaccaacgagtggtttagatccaaaaacaagacaattattttgcgaagaaatgatagatcaaaaaaaacatggaagaactattttgttttctacgcatattacatcagatctggataaaataggagataatattattcttatggatagagggagaattttaaaggaagctacaaaacaagagttccttatgggggaaccaactgtagaagccgcgatggtgaacttaataactgaaggaggaaaagcatgaaaatattaactttgatagagaaggagataaaactagcagggaattatttttggctatccataatggtgttaattggtattcctatttttttgaatcagcagagtggtggacaatatagtggaatttatacattaatgattgctctaaatttttcaatatattttctttttaataatatttttttaaacgaggataaatataaagggaatttatatatgctagcattgccctttggtaagaacagacttgtattggcgaaatatatattagcgattctgatgttcatatttgctataatatgttataaggggatggcaagtgtaggagtatatttaaatattgtattttctcaattaaactattcggagatgtcaattgtattttttgtgtttagtctaataataggtatattcttcccaatttattacaagttttcttatgcaaaaataaaagttcttttggcggcaatcatgatttttttaccgacatggggattagtgatactcaaatatattctggatattgaagtggtatatcaaaaaattgtgataagtacgcgtgctttgattagtattaatattttaagcattatagttatgttatgttctgtgtctatttccataaaatgtttgaattctaaaaattaaaatcgttatatgattgtgtaggatagaataaatgaaaaaaagtaatataaaaaaaagaatatatcaaatagtaggaataacaatatacatatgtataattcttttagtgggtaaaatgacaagaagttttttgcaggaattcaaatatgagatgggggagtttaatattgctacattagggagttttataggggcttatgttgtatgcgtattggtacatgaattagcacatttaatcagttttttattgatgggatttccagttgtagcagcggaaatatgtggtatacttttgcttttttcacatagaaaaatcaaagtgaaaattaattttagtagaattatgttaggtggttggatattgccagtagtgaagaaaaatatagtttcgttaaaacagtacaaacactataaaagagggttttcatttgctttgattatgggtccagtggtttcttgtgtgctgatggtgttttcactcctgattaatataaaattaaaaaatgatgatatttggtataggcaatttttctttttattatttttcttctcggcagggtttgtgatttcaagtgttttgaaaaaaggaaatagtcgtggggatatttattcattttttttaatacaaaaaagaaaaatattttttttggtacagatgtgtgaaaatatagatatggaaaaagaaaaaaatatttataaaatatctaattgcttaattaaagagttggaaaaagaattgcaatttcaagcgaagaaaaatagtaatattttagaagatgctataatggttagtgcaataaatattatattgatgagatatattatatgtggcgatataatagattcctctacgaaagaactatttgaatattgcataaatacgttggaaacagataaaattcggtttatggaggaagaatgtaaaatattatttattcatcttatatattatttgaaatacgaagatgatcatagatgggaaacgttgattccatatgctataaatatttttgatgatgatggagtaaaccagtattataaagcgcaaataaaacaaatatgttatttggaaaataatttggaatttctaaatgagagggagaatataaaaacttcatctttttgggaaattgaacatttgctgaatatacaacaacaagatgagagaaatttgcttaaaattttttgtgagagtattaattaatcataaagcaatcttaaatgctggatgaattaatgattattccgggtttccagcgcattctggtcgcagttccatagacgcaggaatcatatccaatggctgttcatatgagatggtgtcaggattatgaaaatctaccctgacgacttcctggctttccggagtgttatagctgcgtccggttgccgctggtaaatccatgcaacctttttgccgtagtcgctttacccagttataaaaggttccaggcttgatgtcgtgttccgcacaccattgatgatctgtcaatccactttgacggcattccatgatgagacggtattgttcttcagcaggtattctgtaagtgcaaaatattgctacgttactcataaattgcgcctgcaccaaaatgatagatgcaagcgttttactctattttagttttgacagttagctttcgcagccttgctccatggggcgaactgctctaactgctcatctgacattttatcattcggtcgttgtgacaagagatatgtcagatatttataggtattcagatcattcgcttttgccatctcaaccatagtatacacaatagcactggcggtggctcctttaggactggcactgaacaaccagttcttccggttatgctcttaagcacataacaggaattatgtgttgaatcaagttatgtgctcatagagtctaatcgagcttatttttataatgcagattactttctatgagcacataatttttatcataatgagttcaagaagttcatgatatctgcagatggcttgtatttataagaactgttaccggcacttcccactttttccatagctttacgtttaagctccatatcggcaatcatatatttatgtgttgtttctatacttgaatgtcccaaccatatggctattgtcgatatgtcaacacccgatatcaacaaattcattgcaacagaatgcctgaatgtatgtggtgtaactgttttctcgcgtaggcttggaacctgagctgttgcttgagatacaagtttattaaggcgtgttcgtacaccagaacgtgttaattcatcaccgtttttgtttataaaaagataatcggtgcattcagcagagtaggtctttaaatacttatttatatattttacagtagttttccataatggaacttctcgttgtttacgacctttaccatgaatgatcacacttgcatgattaacagagtctgcgccatgaatatctgatactttaatttcaagaagttctgacactctaacacccgtgttatacataagcaaaagcatcaatttatcacgtgctcctataaatgtatttgtatcacagacttggattaaggcattaaattcctctttcgttataaaactcataaccggtaattcgtgcttttgagcaggcaacataagagctcgtttgcttattgcactatattcaggagctgtttcggctacatactgcataaatgattttatagctgctatacgattatttatagttactggtttattttttctcttttcctcaagatatttacaaaagcattgcagatactcgagatcgaaatgatttatacttacttttgttgcagatattccatgcacatcttccagatatcgtaaatataattgaaatgtatccttataagaacaaaccgtctgataggaaacttttctttgttgcatcaggcgttgtaaaaaatagttttggatcagtgtttgtatggaaagtaactcagatttcatcatcattccctccaaactgttcctcgtactttgaacacgatacttttaataattcgggggttgcagataaataccagaaggtatctgccggttttacatgtcctagataagttgataagacatgtagtttatcatttacgtcttctccctgctcattccatcttaagattgtattgcaggcaaatgtatggcgaaaatcatataatcttacatatggatatcctgtaggcttagaattgatgcatggacgaatcagcttaaatgcatatgcaagtgatgattcggtcaattttttgccacctgttgtatagaaaaatggatccttcgatgattttaatcccaacttttcttcaatccactgacgataagagcgaagttgttctgttacacttttgtgtatcggtatatatcgttcttttgaaaactttgtttttcttatatgtaatgtattatttttaaagtctacatcttcgttcaaaagatttactggttcggatggtctcattcctgtagaccacagcaatccgatgatgatatttgttgtgtatgagcgaattccatcaggtgaataaagattttgacattcatccataagagtcccgacatctgattgcgaatatatgtatggtgtagggcgctcatggacatttttaaaaatcaaactatgtataatctcactctcggtcgaaggaatacacatacttagaaaacgggcgtattacttctatttttcgtcccatagtcttgtctgactgcttaccggaggcaacccatttcaatacaatttcagttgttaaaggaccatcatacttaatagattgcgtataagcagcaaagcgtttgagtacagttgcttcatgtgtcagcttaaaaccaaggctgtgcttatattcaagataaccttttaattgtcgggagattctgttactttccatcacaatcacctcccggccaaggtgctgcaaccacttttaagtgttcgaaatccacttttatataggctttagtcgaatcaagagattcatgtctgtttattgtaaaatagaattaccgaaagttgcaaacgggaattggagaatgttgcatctccaaattggagaaagttgcaaggcattcgctagaagcgctcaggaacggtgtagcgcttgagtggcagccaccaagtatgagcattcccatgaaaagatccattgcaggtatatccaaaaaccattaaccttatctttattgtagtccaaacaataaagacaaggaggaaaggagaatgtcaactacaatggatcagatacatcatatcagagatatgttctaccggcaagataagaacatttctgaaatcgcatctgagaccggccttaactggaaaacggtcaaaaaatatgtggatatggaggactttaacaatccatctcccaaacctgcatcatcagaggttcacgaatccaagcttgacccattcaaacctttgattgatgaatggctgcaggcagacaagcttgcaccaagaaagcaacggcatacagccaaaagagtatttaaacgcctcaaggatgaagcagatggtttcggctgcagttatcggcttgttgccttatacgtcaaacagaagaaagaggaactacggctaaaaagaaccgatggctatatccctcttaatcatcatcccggcgaagcccagtcagactttggaacagccgatttttatgaaaatgacaggcttcatcacgaggctaagtaccttgtgctcagttttccctacagtaacggaggtttcctccagcttaattatggcgaaaacatggaatgtcttctggaaggactggttgccatatttgagcacatcggtggtgttcccacggaaatctggtttgacaataccagaaccattgttaccgaaatcatcaaaggtggcgggcgtaatgtaacagagcggtttcaacgcttttgtgaacactaccgcattaagccggtttttatgaatcctgaatccggatgggaaaaaggaaacgtggaaaacaaggttggctacctgcgccgcaacgaacttgtaccggtaccccgctttgatgatcttgtgaaagaaaacaagcatcttctggatcgttgtgaaatcgatatgcagcgtgagcactatgatgacgatgatgaccgctttatcagtaaactgtttgaagaagataaggctcgtttactgccgcttccttccgttccgtttgatacggcactttacacaacggcaacaacggataaatatggaaagtttactcttgacgcaggaaagcaccgttattctgcttcaccggctttctgtgagtccattgtaaatctcaagattacatcctctgatgtgattgtcatggacaaagatatgcacgaagtggtgcgtcataagcgcctttacggcaatgaacatgaaagaatggactggctgccataccttacatatatcgccaggaaaccccgttctcttcgaaacagcggcatatatgacatgatgccacaaaccatgcagatatacatggataactgcgaaagcaaggaacgcggacgtgtcctgaaggtgcttgcagaacttacggaaagaaccgggtttgctagtgctgtcagaacagttgacgaagcagtccggctgaatgccacagatccggacagtctgcagagcctttacaggcgaacctatgcagatgtaccgcttctgcctccgcttgaaaacaaagttttactgccacagcagaaggtcattccgttcagaaatgatctgaaaatgctggatgccgcccttaagaagggaggtgtctcaaatggctgatatagaaaaatccattgcagcatgctgcaaacagctcaagctgtccacgaactttgcagggcaggctttcgagcagaaaggagacacaccgcaggaataccttttaaacctcctgacaaacgaaattgaataccgtacagcaaaaaggaagagcaagttcctcaataccgccggcttcccacgtagataccgcgtggaggaattcagggcagatgagatagatttcccggaagacgtcagcttccaaagcctgttagacctggagttttatcatacaggaaaaaatgtcatcatgtatggaggaacaggaaccggtaaaacaatgctttccattctgattggaatgtctgcatgtaatcaggaaattccggtaagattctaccgcactgccggacttatcaatctcttttccgagagtcagagcagcggaaagcttactgcactgaaaaagaagcttaacagtgcccggatactgattctggatgaattcggatatgttccgtatgaccgcaccggttcacagcttctgtttgattatctttctgagatacacgagcagaaatcggtgattttaaacacgaatcttgaattctcacagtgggtgaacgttctttatgaccaacggatgacaacagcactgattggcaggctcacccaccatgtggaactgattctgttcccggggatcaataatcggttacgtgaatcaagcatcaatgcaactctttcaagaatcagcagtcaggaggcaggtaacaatggctaaaaataaaaaagttatcaaagaacagaaaaaatatcaaaaccttcaggaacgctatgaggagatgaatgattatcttcttgatctcatagaagatcaccgatgcgcagaagaagatctgagatatctaaatgattttatccattataaagagctggatgaggagttccgctatttcagggaacatgcacatgaagatgaaaactcggaacttccgtttccatatctcacgctataacaactaaatatggtctgcaatggctatgtagctggcagaatagctgccagccgaggccttgcaactttctccaatttggagatgcaacattctccaaaaatattttgcatttttctccaaaaagtgcttgcaaaaaacaattcatgtccaagtatatctgctgttaatttaaggcccgtaccattattgaatatctttgatgccgctgtccgacgcaaagcatgtgttcctttccaatagccagtaatgtattctttttcaaaagcattacgaataacgtatcggacattttcacggctcatacaggtgtaccgatttacatactttcttaaaagaagatgtttttcatcaggaacagaaggtctatagcgaaggatatattcttctagaagctttcccaattcagcagataaaggcaactgtctaacatgattattctttgtaccatgtatttgaatcaacgcatttgcccatttaatgtcactcaacataatgttcggaatttcagaacatcgtaatcctagatcgagcatcaagcggattataatgttattgcgaatacctatttcttcatcattcctataatggaaacgcaaccgtttttcctcgtctgatgtaagtatgatgggaacatttgattttgccagtcagcagatgtaagtggtaattctaataccgatttatttattacatatcccttatattcgaggaagcggaaaaagtttcttaatgatgtaatatatctgccgatacttgatgcttttatgttctgaaaaaccgtacatacatactggtttatatcctcagctgttaacattgaccagtcattaggaatgatatctaaagaatcaagaaaaactgaaatatgatgacattctgctgtcgctgacatacttgttatgtgtttgaattcagtagaatatttgaagaattcttccagcaattccttatttcttgttgttttatatttctggtttctatcatagtttctaaagacttcaccggtttgcatctgaaacaataaacttgaagcaggtcctatgttgtgtctggtggacggactaaaagtttgattgttatcggtcagggtataatttatgtgctcatacaaaagttgtgtttctgttacattccatgaatctggtgcttgttctaacgctttcgtataagtatgaattgtttgtggagaatatcccttgtttgcaaggaatttctcgaagttgtgtccaatgatttctaggttcataagctacctcctttacgattaataaggtaactatgacatttttcttgaaatatgttaagagcacataactaagttcggcacataattccggttatgctcttaagcacataaccggaagaactggttgttcagtgccagtcctaaaggagccaccgccagtgctattgtgtatactatggttgagatggcaaaagcgaatgatctgaatacctgtaaatatctgacatatctcttgtcacaacgaccgaatgataaaatgtcagatgagcagttagagcagtccgccccatggagcaaggctgcgaaagctaactgtcaaaactaaaatagagtaaaacgcttgcatctatcattttggtgcaggcgcaatttatgagtaacgtagcaatattttgcacttaccttttttgaggttttccaaaaaattatttaaaaaattagcactcacctcttggctcgtttggggtggttttgtcctgtggcgtcagagcccgttaagccttattttacaaggtttttgcgggttcttactttttgtctggaggcgtcaaaaatcgtcattttttgaaaaaatggtgtagtaaatggtgtagtaaaatactataattatcttggaacagccagaaactaaagtgttatcgaagattacaatattgaataaatataatcaaactagatcgaggaaaagtatgaaggatgctataccatgggattataatttcgaggatgacagttatgcgagaaatgatgaaacaattggatatgagcaaacagaattgtcaaagagcgtttttgtggaaacgtttggtcaaaatggctttcaagcaatgattaagcctaatgatagaattgcaattagtgttaaaaagaataatattgaaaaagattttttgttcgatattatgaataatcctaataagtgtcagcctaagtaccaagctgaagtttataattataataatggtgctttgaaatttaaagcaatatatcatacaattggaaattttgcacctgttccaagaactattgtttctaagaattatggaccaaacttgcaaatgatacatagaaatttaaatgaattatggccatggtttttgaaatatatggctgataattggtgtgaatggcctactaaagttcaggaattattgagctttaaggaatacatgatttgctcctgtcagcagatgtattataaaaatatatttgatgaaatctatgaaaaattcatagaaaacagaaatgatttccagatcgatctggctgaagaaattttaagttggaataataaaattaaagcaaatgattttgaggagaatctgatatcatttaatgaattatttgaaaaaggaaacatagatgagattgataaaaggataggttttttaatacagttaagaggcagatgtattacatatttaataacgaagggcaaaggagtttgaagatgacaaatgatgaaataagaatctggggaatacatacgcaggatgataatctatttctcaagaataatgtaattgcaatcggctggagtgctatgggagaccttagctgcattaatgcaaacagagatgcctttaaagaaaaatatacacaggtttatccagatgcgaagaaaggaaatattgcaaccggtgcaggaatgctttatcgattctgctatgaaatgcagattggcgattatgttgtattcccttcaaagagtaaccgggaagtaaatatcggagttgttgaaggtggatatgtatatgattcaacacaagttgaatatgtacagacaagaaaagtaaagtggttgaaacaccttccgaggatggtgttttctcagggggcgctttatgagattggatcagcaatgtctttgttttctgtaaaaaattatgcagatgagtatcttggcgcacttgacaaggatttcaagaagaactattcttctgattcggaggatgagagtgttggtgcaacagcagatgacattatcgaaagtacaaaagattttattttaaaggagttaagccgtcagcttaaaggttatgacttggaaagctttgtcgcagatcttcttagagctatgggatacagaacaaccgtatcaccgcatggtggcgacagcggtatagatattactgcatataaagatgaacttccgcctcgtattcttgttcaggtaaagagtcaggatggagatattaaagaaacgacaattcagtcattgaagggcgcaatgagagaaggcgattatggtctgtttgtaactctttcaaattatacgaagaatgcacagaagtatcttgataatacgccaattattcgtggcatcaatggcaccgaacttgttgagcttattttgaaatactatgaagatttaagtgaaaaatataggaagatgattccgctcaaacaggtttacattccagttccgaaagaggagtaactattttagggatgaaaaatgcatttcaaattgaagaagaatattaaagtgagttgctacatgtaaatatacgaaacattaagggggatcagtggtgaattacagtgaatttgtaaaatcaacagtttgcacattggaaccggatatttatcaattgctccagaaaacactagttggagagtacttatctttttctataatttcagattcggagatcacacaggatatactggcagaaaaaatctgtgactattttgagaaacttgaattgaaaacggggaaaaactttgagaaatttatcaattcctacatggataatatcgaagtgcttgttgatcagtatgtagttaaaacaccgcagtataagaagaaagatgcagatcccgttattgttccaagagcacgaaagtatcttgaaaaggcacagtcaatcagaaaagtacgatcattgtccgttcgcaatttaattgacttcacaagaataacaatgtgcctttatacggcagtaatttcaaataatcataaagaaattagtaactttgatttttctgctgcatgcattgatcctgatattattatcgcttctttgaaagatgaggagagtacaatcttaaagataagaaaaaagagatttgatataagggatctctactgttcggatacctgcacctttattgttgccattatcatactttataaaattgtaggagataagatacaaggagaatattatcatgagtgatacattgatcgtagatgcgttggaacaattaaccccttttttgaatgataaaaaagtccttgaaattgttgtgagaggaaaaaataaaagaatccaaaactttcagaaggttgctttaaatgaattaccgcagaatgaggcgaaggaagtagcagataaagctttgcaggcgttgggtataaataatctttttgaaaataagaacctaaatatgattcagcaggttgcaagaatgcagaatctgagtattgttctgaacggattaaacctttgtggaacctgtgccggttttgcaattatatatgaaaaactggacaaaatgagcgcagagattaaccagcaatttattcagcttcaacatttgataaagcaaggtacggatatacaaacggaatatgagtttaaaaaggttctgtcagaacatacagatatgcttgatgcaagaaaaatccagcagccttattctgaagaaaagatgagaaagttggttgatgcagaatataatgtactggaaatgctcattaatgtgtttcaaaaagatattgcagcagatggggataccattattgtttctattttttctctgcttgcaatgttgacggtgtcgttgtgttattttgatgagcaatattatttcaatcaccatgaagtggttggagatcagaatgtatggcattcctcccacaacaaatggatgacagtatattctacgttgctgtcgcaatggtttattgaaaagctgcaggatcatggaatgtttgaaactaaacttacaacaacaggtgttgatatttattatactgaattgcttgatcaggttagtgggttgcgtcaggaagtagaagataatcagaaattgattgttgcaattggagacgcaacgatattgaacgacattcgggagacaagctttcgtgaggttaaagaaagtatagagtctgctttgaaagaagcgtttgcagaatatgacacttcagaatatagagaagtatttgatgtggcaatgaaacaagtggcaatgatgtaagataggaggaggttatggtcgtagatgtaaaaaatgctttagataatctcctgtcggcctgcagatcagtacagcccatacttttggctattggagaaaaacgggatatagaagggatgactgtcggtgagatcctgaattttatcaaatacatttcgatagcagggaccgaagacagaattgcgcttttcaaggagacatatatagccccggctttgcgttttatagagccgacttctgaagtgggagcaataccggaagcatttgaaatcctgtgtaatcttgatcagaagctgacgaatgggaaaggtgtgagattatcgtctttgtatttggcttgtgctgttgaaataggaagattttatacattaagtcgatatgacaagaaagatatcgactccaaaagatttacagaacagttgaagacgatgaaggaatattctgaaagtattttagaaaacgatactagcgtcatggaagaaagtactgtgcaagctgaggataagcggcttaaagagcggtgtgataaggataataagttggaagagttaaacgagccagaagaaacgattgaagagcttttggacaaacttaatagcttaattgggcttgccagagtaaagcaagaggtcaacagtctcattaatctgctaaaaattaataagattcgcaaaaatagagggtataaagtgccgaatgtatcaaggcatttagtttttttgggtaatcctgggaccggaaaaacaactgtggcacgtctgatctcaaagatatataagcagttaggtgttctggaaaaggggcaattggtggaagttgaccgggcgggcttagttgctggatatgtggggcagaccgcattgaaaacgaaagaaaaaatcaatgaagctatgggtggaattttgtttattgatgaagcgtatacattggcaaaaggcggaggcgattttggtcaagaggctattgatacgattctcaaggcgatggaagataatcgtgagaattttgttgtgattgttgctggttatcccggcccaatggaagattttttagaatctaatccaggactaaagtcaagatttaataagagcattttgtttgaagattattcgaaagatgaactttttgaaatatttgaagtattttgtaaatccaatgatatggtattggcaacagacactgaaaagcatttacgaaattatctggagcaactgtgtaatcacagaccagagaactttgccaatggacgagatatgagaaatttgtttgagtcagcgctatccaatcaggcaaatagattggcattacttgcaggaatttctgaccgagaattgagtgaaattactattgatgatcttgggatttaatatggttaataggtagaatatgatatgcgaacaagttttttctaccgtacatcttgtgaatgttgttttgtcgcgattgtcgttgtaaagatcaaaaatggttttttcctgcatggctcgtagcttaatgataatctttaaaattagcattcacctcttggctcgtttgggatcgttttgttctgtggcgtcagaaaccgtcattttttgcgaaaatggtgtagtaaaatttattgtgccgggaggaaaaatgaagatatataagttctgatgcaacggattatataatagattgacatgttttaggatttattgtatgctaattagcagagcattagttcattatggtagaataccttttcttaagaaaggagatcctggttcgattccaggatgctaaaaagcatttgtattaaaatgctttttagcatcttgaaatcgaatttattattatggcacaagatattttcgtggcaagttcagaaaatcttaaagaactgaaaaagcacagaaatcgattaaaatgtttagtcaatagagcaatacgggaaaatagtttatctgaattagattcattgacaaaagtatatgcacttctatattcggcgtatgtggaagtatcatttctaaaacttattcatactcctaaggttttttcggattctgaaattgaacaaatacaaaagaaacgtaatttggaggaaaagtgggagaaatgttttgagttagcttttaataagttaaataccgatgcaaataagggagaaatttccaataaaaaacaagccttaaatagaatattaatgcaatatataatagatcctagcttaatgagaaataaaatagctcatggacagtgggctagatgtttaaataatgactgtagcaaagaaaatcagaatgcaacatctgaaatgagaaatctggattttgttcaaattgatagatatttttctatatatgataaatttcagcaatgtattttagatcttgctgtatcgccgaaaacacattatcgtgattattattgtataatgcaagaacttcaactatatgtgaacaatactagtacatggacgatagagacaaaaaaacagcaattattatcatcttctaaatatattagatataaaaaccaaagaaaatgatttaatttgaaatcaatagacctgcaaagtgtcaaaaatacttgcaggttttattatttcggttgaaaaaaattaatttgtggtcttgtttaaataatgtatgcatttgtagtaaaatttaagaaaaaccaaataaaatattgtaaatgagattggtttttgatttagaaaattggttggaaacaaagattgagcgatatactcattccgattttaatacataattaaaaaaataacacgggagttattttgcaggtggtaagtggacatagttacagaaaaatttatatatatttgattattttgtgatatagataatagcgagtggttagattatgtctttgtgtttcgcaaataacgaattagcagattttatgtaggtaagcctgatggggacgaacaagaaaatataaaattttatagaaagatagaatttaaaatatatctttatagttttatcatacaactaactacttttttaggtgtagattgcctccttgattcgtcaaggaactcaatatagtggggttagataagagtgttgaagaaaagtgctactatgagagcatttcgtattcagaaaatccatagctgcgttatgatgtccaacagtcacttacggaacacgagaaaggaacgatgaaattcaacagacttccttcatacctctgtatttgttggaagattagaactacccctacatcattaaaaaggcattaggaaatatgtaaagagggaatgaacagtttgaaatcggatttaaaggagcaagataatttgctgcgtaccaccaatgcccttggagtacgattctgtgatgggctatggaagattattgaaaatgcatgttgtaagaaaaaataggagtggcttggaggaaaggatcacggggatacactagagggaaaagctccatatggctgagagtagttagaggtggaaatcagcagtgtgtggaactgaaagtttcagataagaccgtttcgaaagatatgtgagccaaggtaagaaacagtgtttagaatgagcgttttccttaagcgaggacgatacgtgtcagtacaacgaactctgcaaaagttgcatattccatttttttaccagtagagcttccggatgatgatggcggatatccaatacaaagtagaaaaacgtttctacaaaggaaaacgatagatttttaccttgtggcaagtaaaaatagatacgttatcagcggaggtatatatgatgaaactattcctgtattttttatacattattgatatctggttttactccctattaaacttttagtagaattgtgattaaaatacaataagatattataaaaccttggaaagtaaaatcagaataattttttaattggagcaagcaaatgaaaaagcagatgaaacatatttcatatatgaaatcactaagttatgcagagttaattgaagatattaaatttaatgttgatgaatctttttttgaaccacttatgagtagaaagtatttgcaatggatttataatagcagatttttctctgattttgaaaagcaaataatcgttgaatgcttgaaaaataaaatcccaagtcactccaaagaactggaacttaattatcgttttatagaaactttttttccaattgcttcaaatatatatgaagaaatgtgcaaaaaaataagtgaaaacttcgcggattcaatggttatattttcttattgtattggtaaatatatagagataaacccagatacaattggcaccgcaaaagaacttttgatgagaattgctatgaaagtattaaataaaaaactagaggttggtgcccagaaaatacttttttctgattcggtatattataaatattcatctgtaattgaggagttatataaaaaagcaatcctatatggcgtattgcaagaaaaatatgatgctattagttttggacgagagagaataattagtatttctactttaagcagagtaccggtactgacaatgtgtcttactgatccagagcttgagaaagggcttcaatacgggtggcaatatgacgattatttagcaagtaggaaagatgagattcataatattatatacgagcattacaaatgtaaattatgcagttattgctttctgatggggattcctgatgataaaaaagagtttgcattttatttgcttgaaagacaatttttaacaatgaaatggattgatgcattattcttttatacaggaactttaccctcatacgtgctatctgttatctcattgatatatgtagaaatagttaaattaattctgttctccagagcctcgtacattattctttcaaaaaatgacattcgcaaaaacatgatgtggggtggcttcattctggactctgatttcgatgattgttatgagatgataattaaacatgaacaaccaaagggatattttttgccattgaatgagggggagagtttactaattggtaaatggatgtttgattttgacatttcaattattgaatgtgcaaaatccgtgtcttttgatactaaaatatctggacgccttggaaaaagttccaacttttttggcaagaatgtatttgaaagatttgtccgcgatcgtttagaattatataactggaaagtaataaaatcttcaataacactaaagaaaaataaacaaatagttactgatgtagacttacttgcttataaagatggtgtgttagttattggagaagtaaaggttgcccattgtgaacggagcccttatcaaatatggaaagcgtctgtaaccctacgacaagcgcaagagcaagcaaaaactacattagaaattttgaaaaatgatcttactttattaaaatcaatttttgctaaagaaaacattaaacttcaggtacaggatattaaacatataattcccgtagttataacaacaagcaattattttacaagtttagaaaaatcaccaaacataatcggttttgacatgttaatggaattaatgaatcatgcccaagatgatgatagttcagaattaatatttcgatcgctaacaaatcctacttcattattctcttttcctaaactttcaaaaacacagagcgttatcgaaacagacaggtttcatattatttatgaagaatttgaataatcaaataatttattcttaaacaaaattactatttttcattttaaaaataggtttattattatgggattagatttcaaagagaaaattaactgttccaacttcaatggcaacagtggggaatgcacttccacacattatatttgcatggagatatgggatcaaaagatatttatttgataaatctaacgtttgacgaagtttagtgggtgctatgaggacgacccaaaggaattgaaagagccagcgattgtgtcaagattttttcgcaaaagtaaaattctgccgtttggtagccggcagtcaaccggctatgatatcagacgccagatcatcctctgctttgaaaagatgatccatgttcatgtagcgccgagttccccaattggtcgctgctacatgacgcagtctggcacatacaagcattaatgcactttgcccgtcaggaaaagcgccgatcgcttttgtccggcgtttgatttcacggttgagacattcaatggtattgttcgttcggatccgagtccaatgctgagtaggaaaatccatataggctaaggtttcttcgatgccatcttcaaccttttgggccgccttcgaaagtttcatgactttcagcttgtcggctacctggactgctttttcacgggcagcctccttgctttcttgagaatgaattgctttaagcataagagctactgccttcatcttatttcgaggtgtaacggaaaaaatattcctgtaaaaatgtacggtacaacgctgatatctggcgtccggaaagacttccgggattgtttccagcataccgagatttttgtcgccaataattagacgtacgccagtaagccctcgttctttcagccatacaaagaaagaacgccagctctcacgatcctctttcattccctcagcagcaccaaggatttcacggcagccatcctggctgaccccaatcgcaaccagaacggaaacattctggatttcgccaccccagctgcgtttcagatagacgccatctacataaacataaggatattccccggaaagcggacgggtacgccaggtttcgatatgttcatatgcctttttattcaggttactgattgttcctggagagactttggttccccataaagcttcggtgatatcttccacacgccggacagaaacacctgcgagatacatctcaatcaacgcttcctcaacagaagattccctgcggcggtagcgttcaataatagcggtttcaaaaggaatgccctttagtttgggaactttcaattctacttcccctgttgtagtatgaaggtttcacttatagtgcccggaacgatatccctggcgctcagaggaacgctcatacttttcggcgttgactaattcgtcggcttccttatcaagcaaagcgtttagagtttcttcaacactgctacgaacaagatcttttaaatcgtgctttattaagtcctcatttagttgtataatcttatcagacatggttttatagcctcctttgatggattttgttgtggtgacttaattctaccaaacggctatagaccatgtctatttttatgaaattttatttttgcgaaatttattatacgtcatcgagccagctgcctttacaagtagtgtttcgataagtaattttaggatggtggcctaaaacgtcctagtataaccattgatcgcgggggagatatggacaaaggagatggggagcagacactttgaatttatgaaaaagagactccatatatagaatacaactatatttatcgattttataaaaaaggcatcgtcaattatcgaaagggagtctctttatttataaatatagaatacacctgaaaatacttattaaaagtatagacaacaatccgcttagggagatcatatcattagacgaaaggatatgatttaattactatcgcctaataattcttttggaaattgctcttgaaaatgtttacatactctgtgattccatgtaacactatgttcttctaaaataaacgaaattattttagcaaaaacatctggaagtttggatttgtatttatcaagtacagtttcccaagtcggtaatgtgtcttgatcgtccttaaaaaagagccgaagttgatcttcaataaattgaaaataatcgttttcgtattgaccatatttagaattagttctggtttctttgtcacggtcttgaaaaattttttctaatctagttacaaaatcaacattctcaaagttatcctcgtggtagataaaattataggcgcgttttcttaacaaagtcatactttgagtgatagtgaaaagttgtccattatagagtttaattgttttaccgttttggattaaaaaatgatctttcacatacttttcacgattggcgctatatttggaaagaaattgttgattgctcaattttatttcccaataatttgtgttctggttgtagaaaaagtcgttatagaacatttgaatgttaaatgataaatattctgctttttccagatcacgttttaaagtagttgcttttgagtaggcgtcatttaacatttgaatttcgataatgtggaaatttgtgtacatatccttttctgattgggatgaaataaaatcattagtaaaaagaagcctttctttttttactccgctaacattgctaataatataaaatgaaaataattcatatatatcatttattgtaatatgttgatggagttttgcttttaaccaccatacttttattaatgcaataaatacaattttcatttcgcatttacatattgagttaagcaataacttaaatatttctcgtgttgttgagtcattatcaggtaaataccgtttgtaatatgatgaatttgcgtcgcaggatagtaataaattgatttcatttaaaaacattgctatatcttttagagcagagtgtaattgagtatcagaaaatagttgacatatatgtattttcccttctgatcctttgtaacgcaagtcgtcatcaaattttgaataattaaaatcagaattttgcattaatagatctatttgaaatgcataattcacatatgattctaatgaaattttttcactgcctaatgtttcactaatttcgaaataagacttttttaaagcagtccatgtttctaatgcctctttccctttttcgctagatattgcttgaaaatagtaggctttaaggatatcctcattatctaatcgaagtcctttctcattaatatccaaaaatactttttcgctttcataagtgttttccccatcaaagattacaactgaaacttgggagtttagtattttgtggataaaatcttttacacatcgtagttgatccggtatacgatgaaatcgatttagattctttgatacaattttatttaaagaagagcatgcagaaatatatcgatttttttgtcgataatcatctgaaaatgaaagcttaaagtctgttggggtaaagttcccttcctcatccgtagaaagctcatatatttgtgcaataaatttctgaaactccggaaaacaatttgcttcaaagtttagacggcgtcctgtactctcatcagataatgtaacatcacgatgtagttcgaaattttttatgttgcaagtgtcttcgtgtaaataaaattgtctacacagtacagttaaaaggataataatagaagtaatacgttgttgcccatcaactaaataataattagagggagcaacaatatttcgcgatactgcaatttgtcctaaatagcaatttccattattgatatcattggcaagttcacttaattgtttttcctcccaacggtattctctttggtaatctggaattattatatttcttcccgcttctaaaaaccaagtgtcatgaacgttggagtttgtttttgtgtaaatagttccttgtttatatgtatgtaaaaattgttcaatcgtcatataagcgccgcgtactttcacaatttcaccacccatttttgttatttgtttaattatatattttttgtcgtttaatgtaaagaaatgtaaattaacattgagaagaaaaacaccaggatatatagtgataatataaactatattttgtaggataaaataagagttaatatagataatacaatcttgatgtaagacctgccgatctatataataagaatagattagggtactattatacaagttattgtcgaggtgggatatggcaaattgtagatttgtagatgaattatatcgattaagaaaatcatccagagagtctatagataatattgaaaaatttgacgactttaaaagatatatgcatatagttcgtaaagctgagaaggatttaaaggagatattgacatcagtaaatgcgtctggtaaaaaaacattgattttgctgtgtggaagtgctggagatggaaaatctcatttattatcgtatcttagaaacgaagaaagaatgttaaatgattatttagtatttaatgacgctacagagagtagtgaaccttccaaaactgcaattgatacgttaaatgaagagttatctgatttttcggatgataatcttgaaaagaaaggtaaaaacattatcttagctattaatttaggggtattaagcaattttattgagtctccatatgctgagaattatcaaatgcttcttaagtatgttgaaaataataatatattaacaactgcaataaatcataatagttacatagaaaacagttatttccaacatgttagtttttctgattatcatatgtatactttatcggataaaggagcagaacctaagtatattcaagcaattttgaataggatttttggaaggatagaagaaaatccttttttttctacatatcaggcatcatgtcaaatatgtccattggcacagaaatgtcctgttaaacataattatgaatttttaatggacgaacaagtacaagaatatattgcacactctttagttgaagtgattgttaaagaaaaagaaattctcaccacaagagagatactaaattatatttatgatattttggtcgttcatagatttagttataaaactttatcagatgtatcaattatcgattccgcctttttgaaagaatatttaggagatatttcacctgttctgatgtttgattatgaggatatatcaccggttttaaatcatttggcaaagtatgatcctctattagagcgatcggaatcagctgatgaattagctattttctactatgtgtctcctgatatttcatcagaagtcaagagagtatttgataatacaccttatgcagtagttcttaatcaacaggagattattgacaagctaaatgaggataaaacgttaaaagctcaaatttttaatatactcattcgaattgagtcaataaaaaaggggataaaaacagatactatttatagccaatatattacagatctttattacttcaatcagggtaaaattcctaaattggcacatttatatgatttggtagaaaaggccgtgacacagtggtgtggatctgattctggaaatgcgatatgtttagatgaatctcgagcaggttttacattatttgaaaatataaaatttgaaccatatttagacgatatacctaccaaaaatcatgtgactagtttagaacagtttgtaccatcaattgttgtaaaatatgaagatcagaagacaaagaatataattgaattggatatcgactactctttatatgaactactgtataaattaaagaatggatatatacaaacagcaaatgatcggaataattatgctgattttataagttttattgaaaaaattctaaaaacaggttctgcggcagaagaagtttttgtaatatcagaaactggaaaaaaagcaagtgtcaaacgcacaaaatttggttatagatttaaggtggtgaaatgatggattatacctttaacgaaaataaatttaatgagagctttaatgttaaatctattgaagaaaaatctattgattcactgcgactttctcatatacctgataatagttttaaattgtacccctataaggcaagtgggaaaacacaggctccaattgtcactgagttagaggagtgtataagtggattttttagaagagcattgggtgttggaacggttcggattgattatagtgatctttgtgattcattattagaaaaccttgaaatagaaccatcagatatagaattatttaaggatttagttaaagatcttttctttgaaggtgaagactttaaggcaacaacattgggattatatccatatcagcgagaaatgaataataaaagcgctgatcggcttgctttctttttattttgtgttctagggattgatcaaaaggattgtgaaataattaagaaagcggtatctcaatatccgtataatgttcttgaacagatggtagtagatgcaattaatgctacggtttcagatcaagaaaaaaatgaaaaaaattattatcccataattacagatgtgcaggaaaagtttaagaaagatttttatttcatgttacaaacagatatgacgtctatcgaagatttttccaatctgttatctttgtattatttttattatgtatctcaggcaagtataacattggaccaattttgccaagggaaaagaaatgaacctgttagcatttattatgcattagactgggaaaaagtcagcaaaaatcgtaagtgttgtagtgagggttgggaagcactccaaacaaatcttaatcatatgttttgccatgcaattacattagagattatcaaccaacatgcggatcctaataccatgtatgattatatagctttacaggaatatattaatcttcatccagagatggatgaagctatttcaaaagagattgaaaaggcagaaagaacatatacatctgcgattggggactataagaaattcgatcaaattgggtatactttggggggaagtaagactgactcagctattaggcatttgtttagatgtgtggaggaacaatttttaaatacggatagaaagagggctaatcagtcttacaatgaaaaattctcagagttttgtaaagtcagatggataaaaaaccgacgtaagtctggattagttcttaatcttacagaaagggatattatttttcttacaaagatatctcttcgagataaagataaaattcgattaaatgatctgtatgaggaatatatgtatagaggtatttttctggacaatatatcaaaggagcatttacaagaattttttacaaaattaaatctaattgataagaagagtgatagtggagatgcacagtatgttaagcgaattttatgattttatagctaagaaaataaatagttattttcagtcgctatctgtagatggtcttttgcaaaaaggtgaaagtttttgtttaaaattggatgatgaagaaacagtagagaatgtatctactgcattacaaaaattagctgaaaagaataatataataggtcattatgagtataagaaaaatggaaatgttgtgtatcgtacatataccttgagagttgttaataatgaaataattattgcttctcaggtagggaaaatgactaatgatttcttgtgcgcaactttgaggaatgctgcaaatgaagatggaaagccgttacttatgatctcatctaatcctattgatagtgcgaaaagtgggtctagggatatggcggctaatggtatgcctttttatgcagataatttaatggatgaaattcgcaatatggttgagaaaagtacacaattgaccttccttgaaaagcaaattttgaattatgaattaaaaaggcgagatggagatgtttttagcgataaggcttctttatatgaatatagagacttattatcaataatgagtagtggttccattgatcctgaaaattatgcgggatttcgattgtttcctgttaatggaaaaatagactatcagaattatgggcgaagtcagattgagaaggaaataaagaataatcatgaactatttgaacgagtagatagaagcattcgatttggcaatcttgaatctgatttgtcggatgacttcgaggaaaattttattcttaaaattgaaaaggaacgaaaaaatgacccagaaaactggagtagattatttacatatgctgaaatgttggctgcaatgcaaaaaaaacaatctaaaagggagaaccctttacagatagatctagacaatatttctgtttatggagatatgccgctaaacgcattacctttagaggagaatgtattgattcgtaatgatggatctatgaaagttaagaaaaggaaaagaagcattattatttttaatccggacaaatatccagttatccatattcggtttgaatgtaatgtacgtatagctaatagtgatatttcaaaggatgatacatcatttgtgagggaagggaaaaatttactttttgaatttgagagagaagatatttcttttcataagatagagattggtgattcggttaataatattacttatatttttaaaatttgtattattgatatttcagcagcgtatcttgctgggacaattaagcgaaattatattgtagattacaagaaaaacagaaaaaactgtaaaataaaacttcttggtgttggctcagatattatatttaatatgaatggttcggtaaatctttctcaaaaattggatgataattcacagtataattgtcagtatgatgagagacttcatttgtatacaacagaagaagaattgtctaattatgggagtggaattaatattgacatcaattttgcgggaataatagtcccatttgctctttatccagatgaaacgagaagtatggaactgattgggcgtaaaattttaaaagataaatttacctatagaagcagttatgaaattgacagtgaagatcatatatataaaggttcgcaagaatatcatgcaaaacaaaatctactgagagaattaagattagaacgttatattatagaaaatcatatagaatatggaaggtgcccacaatttagcaaaggaacggaaatatcaaatatagagggtgttgcgctgcatcagaatgctaaattacatgaggcatattgtgcaatgctagatgaatttcataaggaatcgactgtgccgacattagcatatttatctggtaatcttcttgaaatagttaaaaattatttaaatgcgtttagttctttatatgatggattaaaggatggtaacaatctttctgtagagcaggaaaatggactttttattggtactctttctgtaggaaagtatatggaagaaattttactaacaccatttcaccctttgaatcttgcatatcagttggaattgttaaaagaaacagattttgaatcagcaacagatgttgtaatagatagattaaattccataaatttattgccttatttacaacgtaataaaaaaatattcagagtatcggatcaattgttttctcaggaatggagatattatgctcctgtggaaaataggacttatcgaggcaatcgtcgatatgttcctaaattgatagaagagaaaattacagaatttgtttcacatttccgatatatctttgatgatataaataataagattatacgtcttaatctaattaatatgggagattgcagtgatgtttttgttggtatagctcagtttttggtacattctttgaataaaacacctgatgtggaccgattaaaaaaatttgaaattcatatttatactgataatccggccacaaacgctttttccaatcttaaagagtatgtaagactaaaggaatatttgtttgaattgaaactttccattactgctggaatgaccatgaatagcttggaaggagtattgtcaaaaaatgtggaatgttacttccatgaagatttaggaaataattatgaatatgcacatatttctttttatgaaatggaatctgaaattacttctgaaacagctaccatggatcagattgaaacggggatttctcttggtggtattatttctggcgtgccttctagtaaatatggacagaaatatagaactggattcggaaccaaatatgccaataaaacagatgtcattaaattagcagaaaaatataatgcattggttcaagttggtgatacgggaaatccattttattctggcgcaagtatttctactcagattgattcaaaagctgaggagaaaatggaatttatctataagtcatctaattgggttgtatttgttgatcctaaagttgatttggatttcttttgtgaaaaagaagcaaacaatgacttgcttattatccattatagtgatcaatatacatcaagtagtggatatgatgccataacggtaacacataaatcgcaacagtactctaaagtaattcaggattatttaaaagaaaaaggcatgaatgctagtttagcagatgtggaaaaaatcattaatcttttcaatgcaattaatggtgattggttacttcgtttggtttcgtcaaagaaaatgattggggctaatagggaatctacctttaccagggagaaaatcagcattgttgcagctattaagtttatgcttgcctttctcaaacatcctgatattatatgggtgcctgtttcattagaagaaatgttacgtgtttctggtggcgctggattatcaagctcggaggggatactatcatacaagaatctcgggtttgacagaggcccaacgagtgatgatcttttatttattggattaaattattcaggagaaagagccaaaatatatttgtacccaactgaagttaagacaggcataaatgatagtactgttattagtaaagcgtttgaacaagtatctgctacagcttctggattacaaaatgcaatgaatccggaagaaaagattaatagcacaattttgtataaagttaatcgtaattttttaatgcagttattgatcactagttgtaagaagatgaaagtatatcatgtagatgatagtcaaaattgggatattgttctggaccaatttagaaagaagcttctaaacgaagaatatattatttctgatgatattcaagaacttcttggtaaaggagcagttttatcatttaggaaagcattaagtgtaagaagaacatctttcaaggctgacgccattaattttattgaaatgccggatagcgatgaaattaatttgattttagcttcagttgaagatatatttaaagatattcagcagtaccatgagagcgaatttttaattttccaaaactgtgcagtgaatgccttaactggtgacacttctaaaataatgattacaaaactagaggaagaaaaagataatacaaatcagacagagcaacagaaagaaattatagataaaaaaaatttggacttaataattccgaacaatacacaagaggaggggaagatagatactgatataggcatgaaaattctttttggtactaatctacagaatggagaaaatgtgttatgggaacccaataatacagatgtattatttcatacaaataccggaattattggcacaatgggaactgggaaaacgcagtttacaaaatctttaattactcaattatatcaatcgcaaaagcttaatgttggagatgaggaattaggaatactaatttttgattataagggcgactataatgaaagtaaaagagattttgtagaagctacaaatgctaaggtttataaaccatatgcattacctattaatccccttgcaatcatcgaaacatctgtttttaagccccttttaccggttcatacagcaaacacatttagagatacacttgctaaaatatatggattagggccaaaacagaaagcgacattaacaaattgcattatggaggcatatacggcaagtggaatttataaagcggatacgaaatcttggaaaaatgtagcacctacaattgatcaagtttatcaaagatatttaaatgatgaagaaataaaaaaagcagattcattgagtgcagcaatggaagagttagtaggacagtatgaagttttcgaaaaggttccgtccaaaacaaaatctttgtttgatgtgctaaaaggtgttgttgtcatagatctctcaggatatccttcaacactccaaaacctagttatagcaataatgttggatcttttttatgcacaaatgcagtcagcagggtcaagtaagctagaaggtaaatatcgtcaattaacaaaattcattttagtggatgaagcggataattttatgtcacaggagtttccgtctcttaagaaaatattgaaggaaggtcgagaatttggtgtgggtacaatattatcaacacaatttttgaagcattttgcatcaggggaagatgattatgctaaatatattttgacttgggtagtacataatgttgcagatttaaaaacaaatgatgtggattttgtttttaagacagagcctaagagtaaagaaagccagatgttatacaatgatataaaaaaattacaaaaacataacagtataattaaaattggttctgacaaaccccaatatgttagggataaagctttttgggaattatataaagacatgaaagctaattgacgctaaaagacagtggtgatatacttaagtagtctacttaagtatatcgctttttcttggaggaaactatgaatttttcatataaatttcctgttgttagaggagttcaggcaggaagagaatattatattgcaatggttccattgcgaatgttaggaagattatttcctaatgaggaggaatatgttctccccgagtaccgtgcacagagaaaattaaaccaatctagaattccggtaatcagtagatatattactgagaaccggaattcttatgtattttctgctttagctgcatcaattgatggagaatttaagtttgtaccaagtacagagagcaatgacataggaatattggaaatatctatggatgcaagatttctaatcaacgatggccagcatagaaaggctgctatcttggatgcaataaatgaggagccagatttaggtaatgaaacgatatccattgttttgtatgaagatagtggattatcaagaagtcagcagatctttaccgatcttaataagcatgctgtgaaaacctctaattctatatctgaactgtatgattcaagggataaaattgccgtacttacaagaaatattgtgactagtgtatcatttcttaatgattacacagacaaggaaaaggataatcttggtaaatattcttcaaatctttttaccttaaatatgttttatagtgctaataaaagaatgctggcgggaaaacaaattaccaaagaaatagaaaattttgtttattcatattggaaaaatgtttcagagaacatgatccaatggaatgagctccgaaataaagaaatatcgaaggtggatctaagagaaaattatattgtaacacagggagttgtgatacaagcattagggtgtgtaggagcatattttttaaataatctagaaaccaatatgccggatgtagttacatatttaaaaaaaattaattggaaaagaaatgctgcgtgttggaagtttcgcgtgataagaacagatgggaagatactaacaagtaataaagctataattttaacatctaatcagattaaacaacaaataggtattcctttatcgcaagatgaacaaacaaaggaagagcaattccttgcaaattatattgtataggagaagtgagtatgtcaaataattgtgtgagttgtgagacaaataaacaggacgtaacaattactaagaagacaattgaaggattgaaagaaacaatttgtaatttatatttagcagatgatataccgtgggtaattggatattcaggggggaaggatagtacagccacagtacaattggtgtggttagctcttaagcaattgaaaaaggagcaattaaagaagacggtgtatgtaataaatacagatactttggtggaatcacctgttatatcaaaatgggttgaaaactctttgcgtattatgggtgaaagtgcagaaaaagaagggatgccgtttgctacacgtagattaaccccggcaatggataataccttttgggttaattttttaggaaagggatatccatttccaaggaaaaagttgaggtggtgtacggatcgtttgaaaattcagccggttaatacatttgtgaaagaacagatagcagagcatggcgagattattctagtgattggaacacgaaaggcggagagcactcgtagagcaaagacaatggcttattatgaaaaaaaacgggtgcgggaattgctaagcccaaatccatctatggcaaatgaattggtcttttctccgcttgaagattggactgataatgatgtttgggtgtttcttatgcaatacaaaaatccatggggatattcaaataaggaacttctgactttatacagaggtgcaacatctgatggggaatgtcctatgatgattgaagaaggtttgccaagttgtgggaaaagtaggtttggatgttgggtatgtactatggttgaaaaagataaatctatggaagcaatgattgcaaatgatgatgagaaggcttggatgaccccattgttagaatttaggaatagatttggagatgaggaacatgatagagaacgtcgtagttttagaaaaatgcaaggttttcttcaaggatcatataaacaattaaatcacggaccatataaaaaagaataccgtgaacaatggttaagagagttattggaaattcaaaaagagataaatatatgtgggccaaaagagttttcaaatttagagttgatttcacttcctgaattaaggaatattcgtaggatttgggttcttgaaaaacatgaatttgatgattcattgcctcgcatctatgaggaagtaatggagaaaaaatttgatgatcctgaatggattggatctgaagcttttcgaagtgaggaatggaatattcttaaagaagttgtaaatgaattgtatcccgatgaagaattagcttttgagatggcatatagtttagtagatgttgaaaatcaatcaagtagcctaaacaaaagaaagggcattattgactctcttgagaaatgtattaggaaaactttttataagaatgaagaggatgccacagaatactatatgaataggatggttcgtaagaaggaacttggcggaaaatataatgagaaagcattagattctacatatgactatttatatgggggagatactgacgaagaggacgtaaggtcatgattttaagaaaattaattatgcataattttggtgtttatgcagatacaaatgagtttgtttttcatggacaaaaaccagtagttttgattggtggtatgaatggacgcgggaagacaactttcttagaggcagtgctgttaggactgtatggggctaattcgtttgcatatacagaaagtaaatataaaacttatggacaatatttaagagcgtatgtgaataaatcagatggatcgtttaccacttatgtggaaatcgaattctctatggataatacggaagaggaagtttattttgtacatagggagtgggatgcaaaaggtcagcgagttagagagaagatttccgtaaagaaaaatgggacagagaatactttccttacagaaaactggccaatgtttgtggaaaatattttaccgagtgcgttgtctaattttttcttctttgatggtgaaaagattgcagaattagcggttgagaatactggccaaaaaatgaaggaatcaataaaggctttattaggtatttctgtgcttgatttgttggataatgatttgggaagaattattactaaattgagtaataaggatactaaagatcaaaatcttcagtatctggaattgttaaggaaaaagtttgaaaacgctcgtgaagatcttaaaagtgttgatgcagaaatagaacgtgcggaagagaaattggatgaacttaggattgaattagaaaagaaaaatacagagtatgctgtaaaaggtggggatattgttgaacaacgtcatgatttaatggcacaacgttccgaggcagtggcaacggttgaaagtcaccaaagtattttattagaaatggcagctggagcaataccgatgatattggttcggacacttttggaggatattcagattcagggagaaatggaacagtcatatcgtacttctcgtttggctacacaaaaagtaaattctctttataaagactttttgaaaaagtatcctgattctggcagtgaaatacagaagtttgttgagtatgtcagagcagaaagtgagtctcaacagggagaagaaatttaccaaatttctgatacaacactttatcaagttacatcgcttataaatggaggtttattatcagagttgggaaaaattatttctcatatgcaacgaagaaacacttgtcaaagtaaaatagacgagattgataattatctttccgttgatattgacgagaagttacttggcagaatatttaagcagataaaatctcttgaaatggaaattgcaacggcagagatcgaacttaagatgttagatcagaaacgaataacatttcatggatctgccatgattgctgagtcagagtataataaagctgctgagaaagttctttcctcattagagacaatggatgatgataatcgtgtggttaaatatgcccatatggcaattaaaattataacagcatataaaatccgtttacagcaaagaaaaacagaagtattagctaagacaatgacagaatgttataagaaacttgctaataaaaagaatctaattgataaaattgtgatggatccagagactcttgaccttcattacctaaacaccgatcgggaagaggttgaaaaaaatagcttatctgcaggagaaaaacaattgatggtgatttctttgctatgggcacttgcaatttgttcaaataaaaaattaccggttattattgatacaccgttatcaagattggattctattcatagagaagcattaataacaacctattttccaaatgcaagtgatcagacaatcattctttctacagactctgaaattgataaaaaatactattcactgatgaaaccgagtgtgggagatgaatatactcttatttatgatgatgaattgaagaagacaacaattcaagagggatatttattccatggaggaaatacataatgttgattaaacaaatacgtttgtccgctcaatcaaaagataggttgggaagacttaaaggaaaaaccggaattaaaaactggaatgtattatgtagatgggcgttttgctattctcttagtgaatatactatgccaactgatattccgattaatgccgatagtaatgtggaaatgtcttggtatacttttgctggtgaatatagtgatttgtatgaggcccttataaaggcatggtgtttgaagatgggggttccaacggatgaagaaacattaagtaaatattttaagcttcatttggaaagaggaattgcacatttatcaggaacaaattttattaaaaatttagatgacttgcttaatcttgcagtagaggtgaagtaatgagcgtttatttagattataatgcatcggcacctattgatttaagagtgcttaattatatggttgatatatatcgacataatataggaaatgcagatagcaggacgcatgattttggtgataatgcccgccaaatagtagaaaaagctaggggagaggttgcgtcaattttaaacatcaatagagacgaagtgttttttacaagtggagcaactgaaagcaataatttagctattcaaggtttaagaacctatggaataaaggaagggaagaaacacattgtaacaacaagtattgagcacaaagcgattttagaaacggcaaaggctatgcgggatcaaggatttgaagttgattttgttgctcctaatatagatggaagaatatcggcaaaacagcttctgcaaaaagttagagatgatacgctgttagttagtgtgatgcatgttaataatgaaaccggcatcatacagccggtggaagaaattggagaatacttgtcaaagaagaatatattgtttcatgtggatgctactcaaagttttggaaagttagttgatgaacttcgatctttaaaatatgatattttatctatgagcgcacataagattgggggtcctcaaggaatcggagcattaatactgaagaaaaagagatatcagcgtccaccggtgaagggtatattttatggtggacagcaagagcatggtattcgtccgggaacgataccagtggcattagttgcagcattgggatatgcatgccggcttgccgaaaaggaatataagaataatcaagaaaagtgcgttgaaataaaaaaaaggttagttgagatattaaataattctgatttatattatgaatttaatggaaagcaagaatattgtattcccaatacaatgaatatttatataaaaggtgtagagtcagaagctttgatgctttcaacaaaaaaatattgtggtgtttcgaatggttctgcatgtaatacaaattcatatagccctagttatgtactttctgccatgggtgcatcattggagcaaattgaaaattcaattcgtattagctggggagcagatatggatattgaaaaagtggctaattcctttagtgatttgattgaaattgctaaacggttggtgtggtaaaatatgattatttaagaactatcgatatcagagaaaagactgaaatacaagttaataattattgaaaaaagctactggatgacaaagtctcagtagcttttattccttctcaaactttataatatcattcggttcgcaattcaaaatttcacaaagtctttccagtgtaaacatagtaatggacttattatgttttaaattattgattgtccggggattgataccatacttatgaatcagtgtataggtggagatatcccgtttcttcatggtttcccacaatggagaatagtttatcatttctgctcacttcccagtttgtaatataatcattatcatggtaaaaataatggtttactatactgaaaaatgtatctataatagaggtatatgaagggagagctgggatgaaaaaatatgatgagctatccaacaaagaaaaacataattttgaggaatttcttattacaacattcaagttttccgaagatgagctggcggcaatcgataagcaaaagccaatgacaatggaacttttttcttcatgtctggctaagtgtacggaatggggactttataaactgttcgaaaggttgttggatgagtatccggatttaatggataaatacgtaaaagctatcgatgaagatataaaggatgtggtattgccggaaagaactccagaggaggaagaagaaagctggaatcgattgtgcgaaagaataaaaaatgaatatggtgatgatttaacatgcgaatagctgccggaaaatctggtggctattttttataacagaaatctatgaattaaaatctggcatccggtcaaaaaagacgggatgtttttttatgcactttattaaaaactttgtctccacacactgtataatccacgaatttcctttctataagtgaggggaaatcttttttgaagcagaaaattaacagatttttcgaatcgccttgtatttctgcctctgacgattgggttaagtgaggggatctttaaagaataaaaaagataagagcggatctgattgaaaagaatgaaattatttctttttgcccctgtataatagccgctcccggttacgttaagtgagggggtagatattatagggcaagatccacccgtgttaagcggtaatgccattcctggcggcccccaacttacaggttgagctcttgatggggattttcccagagcaagatccaccccgtaatacactatcgtgtattcctgtgtagggctcttgcctgggatttcggtctccgctccgcttcggtcggtgctaaacgcaggtccaccggacctgcagcacccccataccctcgatgatctgccgatttggcagatattggcgtccactggaaagtgggacgcagcacaataggaagattccggcaggactgccggttctcctgtttgtggtgttactgaagtaactgaaagaagaaaggagatgaagtcatgagaaaaagaagaatggaacaggaattgaaccatccgcattttgtcggagtccggctgtcggatattgaattggaacttctggacaggaaagcagagatcctgggggtgtccagatccgaatgcctgcggaaacttttggtggaaaaggagattgtgcatcgggtagaagtggtcgccgatatggaagaactgcgaagtctggtgggcgcatatggaaagatcggtgtgaacctgaatcagatcgcacggtacttcaatacgggcggggagcgttcactggctatggaagatgaaatccgtcattgcatcgcggaattatttgcactcagggaagaagtgttgaagatggcaggggattttgaacgggattatcggggcggttaaagtagtccagatgaattgttccaaaacgataccgaaatacgacaaaacagcgttttctgccgttagataggataaaccccaggcaaatatatttaaggtaaaaaagcctgtcgtaaaggtcaaaaaatgcaaaaaatgataccgaaacgcgaccatatttcgctgtcctgtaccaggtactggcaggatggcaggaaggaggaatgtctgtgccgagaatgagcaagaaaagaaaacaggaattggccttttttctcaatgaaagagggcgggttgcccacaatgacacctgccggaaatgtgttggagactgcaagcagagtttccggactgtgattgtctgttgcccctgctatgaatccaagcgaagccgtcggcggaagatcagacagaaacaaaaggatggatgtgaagaataaagatcagatggtatacatgacggatcagacccagattccggtatatcttccttacccacggtttctgctggggatggatctgactcagacagccaaggttctgtatgctctgttactggatcgggcgagtctttccaggaagacagggtggaaggatgaggaaggccacatttttgtggtttatcccattgcttatctggctgacgatcttagaaagagtcacatgactgtaaaaaaggcattgaatgaactggaagaagccggacttctggtgagaaaaaaacagggattttcaaaaccgaatctgctgtatgtcagaatcccggcagagggaaagaaaagtgtccctgtgaaggatagaaaagtgtccctcaaagggaaagaaaatgatacttatgagggaaagaaacctgtccctgtgagggatagaaaagtatcccctaataaaatgagtaatagtcaaatgatatatagtcaaatgaataaagagagagaagcgcgctctgcctatggaaaatatcacaatgtgtttctctccgaaacagaatatggagaattgaaacaggagatccgggaattagacaggctgatcgaggagctgtccagctatatgcgttccagtggaaagcaatatgctgatcatgctgctactttgagaagatgggcagaacggtcagccccggtaaaaaatattccggattatacctgtagtgaggaggacagtctatgaacaagatggtagaagaaacagtaaagaacatgattcagcagggagaaagaaccgggaaggattacatcggagaagacggtctcctgtattgtggacaatgccatgaaccgaaggaggcttattttgatcaggagaaaattggagttttgggaataaaaaaacatccgcgtgaatgtgagtgccgtaggcaaaagagaaaagaggaggaacagtaccgggaacagcagcgtcatgaagctgtagtcagagaattgaaggaacattgtttttcgaataaatccatgcagaaatggacatttgcgaatgataatggaatttccgaaaataccatgattgcgaagctatatgtgagagactgggaaacaatgaaggcggaaaatacaggttacctcttctggggagcagtgggaaccgggaaaagttttctggcgggctgtattgccaatgcattgttggaacaggagatagaggtccgtatgaataatttcgcggaagtgctgaatgatctttccgctaatttttcagagaagaatacatacataaaaaatctgtgcagagttccgctgctgattctggatgattttggaatggagcgggggacagagtacggactggaacagatctatgcggtgattgacggcagatatcggagcgggaagcctctgatcgcgacgactaatctgacactgcaggagttaaagaatccgcaggatacagcgcatgccaggatttatgaccggttgctggagatgtgcgtgccggttcagtttaaaggggagagtttccggaaacgtacggctcaggaaaagctgggacggatgcagaaaagagtaaaagaggagatgaggtaaatgagacagacaaaagaaagagagagcagctgccgtctggcagtggatattgaaggtctggccgctatgctttcctgcggacagatgactgcaaggaagattacggaagatgcgggagcccggatcaccatcggccgccgggtattgtactccgtacagaaggtggagaaatatctggaagcaatagcggaatagaggaacacggatgtgcgaggggttggttttgtgctatacttttcatagacaggacaaaaccattccccacaacagggaggtgtggaaattagagaaaggaatggttttgtggcaagaaaagacaatagaggaagaaatctgaggaccggggaatcccagcgcaaggatggactctatatgtaccggtacaaagatgagcggaccggcagacgcctggctgtttactctccggatctggctgaactcaggaaaaaagaaaaagagattgagaaagaccagagcgaaggaattctgaccgatacccaatgcaagaacatgactctcaatgacctgtttgagatccacatggataccagaaagctggcggagagtacacaggccaattacagaaggatgtggaacagtcttgtgaggaatgaactcggacagatgaaagtggtacaggtaagaccatctcatgtacgcctgttttattcccggctgagtaaacagaaatattcccacagtaccatcaagtttctccataatatgatcttaccgagctttgaggtggctgtagatgatgatatcatccggaagaatccggccaagagaacgctgggagattatggagaaccggaaaagaaacgcaccgccctgtcctttgatcagcagaaaaatctgttgaactatgttaagaacagcgaggtattccatatctatctgccgcttttgcaggtgatgatcggaaccggactccgctgtggagaactgatcgggctcacctggaaggacgtagatctgaagacccggaccgtatacgtgaatcatcagctgatctacaagaactatggagacgggtgtgattttcatgtgaccatgccgaagacagaagccgggatccgggagattcccatgagcaaaatggtggcaaaagcctttgagacccagagacggctgaattttcagatggggattcccagagatgtgaaaatcgaagggctttcgaattttgtattcatgagcaggagcggacgtcctatgatgccgactaccgtgaattttattctccgggatattgtgaaggcgtataatgaggaagaaaatgagcgggcaaagcgggagaggagaaagccggaagagctgccgcacatctccgcccatattctcagacatacggcctgtacccggatggcagagacggatctggatatgaaagtggttcagtacgtgatggggcatgccaatatcagtgttacgatggaagtttataaccatattacagaccggtccaggattgaaaaagagattgcgaagatggatttggttcagattatgtgatggaaaattctgtcccggcattggagtttttaagggcataatggtgaaaaacatgaaaaaaaccggatttttctgcttttgatggtgtagtaaattacctcggatttccttgagaatgattacagaactactcgccatgccacctcatgaacttcgttcattcggtcgcggctgtcgccgtataggtccaaaattgtatatgattttctgtgagcaagctcccgaaaatcaatccaatttcgtccctgcatggctcgtagttttcgcgaaaatggtgtaaaaatggtgtagtaagccattttttgaaaaagttaaaaaattggagaccctaaaaagcccgtaaaatcaagcctttttgagggtttccaaaaaaattatttaaaaaattagcactcacctcttgacagtgctaataaatattgttatagttctcgtagaacaacaataatgcggatttctaggtgaaggaggttcatcgctatgaatataaataaatttacgcaaaagtcacttcaggctgtccaggactgcgagaaggtggctctggaatatggcaaccaggagatcgagcaggagcatctgctgtacgcgcttctggtacaggatgacagcctgatcttaaagttgatggaaaagatgggtatagacaagaatgccatggtcaaccgggtggaggaggctatccggaagcgcacgaaggtgcagggaggccagcagtatgttggtcaggatctgaataaggctttgatccacgccgaggacgaggctaagcagatgggggatgagtatgtatccgtagagcatctgttcctttccatgatcaaatatccgaacaaggaggtcaagacgatcttccgcgagatgggagtcaagcgggacgacttcctgcaggtgctgtccacggtgaggggtaaccagcgggttacaagcgataatccggaagacacctacgatacgctgaacaaatacggctcggatctggtggagagggcaagagaccagaaactggatccggttatcggacgtgacgcggagatccgcaatctggtccgcatcctgtcacgcaagacaaagaacaacccggtgctcatcggcgagcccggcgtcggcaagacggcggtggtggaaggcctggcgcagcgtatcgtgcgcggggatgtgccggaaggcttgaaggataagaccatattttccctggatatgggcgctctggtagctggagccaagtacaggggcgaatttgaggaacggctgaaggcagttctggaagaagtaaagaacagtgacggcagaatcatcctgttcattgacgaactgcacaccattgtgggcgcaggaaagacggatggagccatggatgccggcaatatgctcaagcctatgctggccagaggagaacttcactgcatcggtgccaccacccttgacgagtaccgtcagtatatcgagaaggacgcggcgcttgagcgccggttccagccggtcatggtggatgagcctacggtggaggacgcgatctctatcctgcgtggcctgaaggaacgctatgaagtattccatggcgtgaagatcaccgacggagcgctggtcgccgcggcaacgctgtctgaccgctacatctccgaccggttccttccggataaggccatcgacctggtggatgaggcctgcgcgctgatcaagacggaactggattccatgcctgcagaactggatgagatgcagcgcaagatcatgcagatggagattgaagcggcggcccttaagaaggaggacgatcgcctaagcaaggagcgtctggagcacttgaaccaggaacttgcggaacttagagagacatttgccggaaagaaggcccaatgggacaatgaaaaggttggcatagagcgggtacagaagctgcgcgagaagatcgaacaggtgaacaaagagatcgaaaaggcacagcaggcctatgatctgaaccgggcagcagaacttcagtatggcaggcttcctcagctgcagaagcagctggaggaggaagagacgaagattaaggacgaggatcgttccttagtgcatgagagcgtcacagatgaagagatcggaagaatcgtctcccgctggacaggaatcccggtcgccaagcttaatgagagtgagcggagcaagaccctgcatctggcggatgaacttcataaaagagtaatcggacaggatgaaggggtagaactggtgaccgaagcaattatccggtcaaaggcaggcatcaaggatccgaccaagcccatcggctcatttctgttccttggccctaccggtgtgggaaagacggaacttgctaaggcgctggctgagagcctgttcgatgatgagagcaacatggtgcgtatcgacatgagcgagtatatggagaagttttccgtatccagactgatcggggcgcctccgggatatgtcggatatgacgaaggcggacagctgacggaggcggttcggaggaagccatattccgtggtcttgttcgatgagatagaaaaggcccatccggacgtattcaacgtactgctccaggtgctggatgacgggcggatcaccgattcccagggacggacggtggactttaagaacaccatcctgatcatgacatccaacatcggctccggctatctgctggacggcatcgacgaccatggcaatatcagcgaagacagccagcaggcagtcatggaagagttgaaggctcatttcaggccggagtttttaaaccgtctggatgaaatgattatgttcaagccattgacgaaagataatatttatgacattattgacttgttagtagcggatgtgaatcagcgtctcgcggagaaagagatttgcattgccctcactgaagcggcgaaaaattacgtggtagaaggcggctatgaccccacctatggagcaagacctctgaagcgctatctgcagaagcatgtagagaccctggcggccaggctgatgcttcaaggagacgtaggcgcgcaggagaccattgtaatagacgcggaggatggcagattaacggcaaggagccagtcattgtgtcaataatatttcatatcgacgtgaattcagcttaccttagctggacgacaatagaagaattaaagaatggaggagaggtagacttaaggacgattccggccatcatcggcggagatcagaagtcaaggcatggcgtagtgctggccaagtcgcctcttgccaaacagtgtggcattcggacaggggaacctgtcgcgaatgccattcgtaaatgtcccgggcttgtgatgaggccgccggaccataaactgtacagacaatacagcaatatgctgatggagttcttaagaacctatacagaccacatcgagcaggtaagcgtggatgagtgctatatggactttacggagattgcgccccgctttgcgtctccggtggatggcgcccttaagattaagaacgaggtatgccgaaaattcggattcaccgtcaatatcggcatatcgaccaacaagctgctggcaaaaatggcttcggactttgagaagcccaacaaggtgcatacgctgttcccggaggaggtccaggtgaagatgtggccgcttcccgtgagggaactgtatatggcagggcgttccagtgtggagacgttagagaaactggacatacgtaccattggcgatctggcatgcacggatctgaagatactggaactgcatctgaagagccacggcagaaaactctgggaatttgccaacggtatcgatcactccgaagtggcaagagagaaggcagaagcaaaaggaatcgggaactccaccacgcttccccgggatgcaaggacgcaggttgaggcggaggcggtgcttaaggctctggccggaagcgtcggaaggaggcttcgaaaggcaggacagaaagcggggatgctaagcgtggagataaagtaccacacctttgaatccgtatcccatcaaagacagttggaaaagccgacgaatttggatcaggagatttaccaggtggcgagggaattgtttaaggaattatggaatcaggagcccataaggcttcttggaatcagaagttccaaactgtcagaggagggagagccggtgcagcttagcttatttgatattcgctttgaggcggatccgaaaaaagaaaagaaggaaaagatcaatactgccctggaacagatccgtaaaaagtacggcaaagatatcgtcacaaagggtccccattcttgacagaaaaatatttcaacgatatactgataatcagaagagcagttgcgaattataagtttatagtttgcggatgctcttttttggctgataaggaggtatttgatatgggaaagataaattggaaggaatgggggacggacattcttgtggatctatttgctggaatgatcattgccataggaatctataactttgcgctgaatgctaatttcccggtagccggattctcaggaattgccatcatcatgtatcatttgatcgggctcccggtgggagccgggacgattcttttaaatgttccggtggcaatcttctgctataagtttctgggaaggagattttttatcaaatctgtaaagtccatggttatctcatccctcctgatggactatatcgcgccgctgctcccggtatatgagggcagcagacttttggcggcgctgtgtatgggcgtgctgtccggagcaggatatgcgctgatatttatgagaggctcatccactggcggccaggatttcatcagcgtggcgattaagaaggtaaagccgcatgttaccctgggcatgatcacgttcgtgctggatgtggctactatcgtgctgggaagcgtcctggtattcaaggatgtggacgggttcatctatggcgtgctcgttacttatctcatggcgatcgtcatggaccggatactttatggcattgacgaaggcaagatgacatttattgtgacggagcatggcgaggaggtttcaaagcacattgacgcctattccggcagaggctccacgattctcagaggaatgggaagttattcaaaacaggagaaggacgtggtaatgtgcgcgtgcaataacaagcagatgtatacgatcaagaagatggtccataagatcgatccccaggcatttacgattattatggagtccaatgaagtcgtgggagagggcttcaaggaagaaagtggattagattgacaattctgcggccaaaggagtagaatgttgttccactgtgcagaacaggcgctgtacgcgttcaagcggggcaggctgaatcagtataaattttacggcgtttcgatgagaaggattctgtcagtattatcgccgatcgattaagggggggggaaaatccagccccccttttttgacagtcattgcaatgatgtgagcacaatttaatctttgcggcatctggaaataatggtataatgttgctatatggcaacatggatattggaaagaatgaaatctttaggaggcttttttatgaaactgacacagttattggaacgtctggaatacgaggtccgtcagggcagcgatgaggtcgaggtgacccagctgatcaatgattcccgcaaggttacagaagggagcgtcttcgtatgcatcagcggagccgtatcagacggacataaatatattgacgatgtagcagcgaagggggccgctgcagtgatcgtggagcgcccggtagatgcgccaaaagggcttacggtgattcgcgtggatgatacccggtacgccctggcgcttatgtccgccgcctacttcggatatcccgccgaaaagttgaaggtcatcggtattaccgggacgaagggcaagactacgaccacatacatggtcaagtctatcctggagggcgtgggccacaaagtaggcctgatcggcaccattgaggccattatcggggataaggccatcccggcgaacaatacgacgccggagtcttatacgatccatcagtattttgcgcagatggcggaagccggatgcgacagcgtggttatggaagtttcctcccagggcctgatgcttcacaggacggccggtatccagtttgagattggaatctttacgaacctgggggaggatcatatcggcccgaacgagcataaggacttcgaagattacaaacgctgcaaagggatcctgtttacacagtgcaatctgggaattgccaatgtggatgacagatggtatgaagacgtatttaagaatgccacgtgcaaagtggagacttttggattctcggagaaggcagaccttcgcgctacagacgtgcagcatatttcaaggcctgggtatctgggagttaagtaccaggtaagcggcctgatgaactttgatgtggagattgatattccgggcgattttagcgtctacaattccttaaccgctatcgcggtgtgcaggcattttgatgtgcctgtggagaatattaagacagcgcttaaagtggcaaaggtaaaagggcgcatcgagatggtaaaggtgtcggatgactttacgctgatgatcgactatgcccacaatgccatgagtctggaaagcctgctgctgaccttgagggattaccatccgcagcgcattgttacggtattcggctgcggcggcaaccgttcgaagacccgcaggtatgagatgggagaagtggcaggacggctttccgattttacggttatcacatcagataatccgaggtttgaggaaccccaggccatcattgacgatattattgtggggatgaagaagacggatgggaaatatatctccatctgtgacaggaaagaggccatcaagtacgtcatcgagaacggacagccgggcgacgttattattctggctggaaaaggccatgagacttatcaggagatcaagggcgtcaagcatgatatggatgagcgcgtcctgatccgggaaatattagaggagttagatgtacgctgatatcattattgacataacacatgaaaaactggataaagtattccaatacagcatcccctcccatctcgaggggatgcttaaggttggcacggaagtcgtggtgccttttggaagaggcaataaagagacgaagggttacgtgaccggattctccagggaagccgggtatgatgtagcaaagatcaagccggttgccgggattgccaaggatagcgtggcgatcgagtctaaattggtggctttggctgcctggatgaaggagtattacgggggaaccatgatacaggcgcttaagacggtgattcccatcaagcgtacggaacgtgtcaaagaaaaaaggaggatccgcctgctgcttgatgaagaggctgggaaaaaggcgctggatgtctaccttcataagaaccaaaaagccagagccaggcttttggcggctttattggatgagccggagcaggagtacgaacttttgaccaggaagctgaacatcaccagggcagtggtaagagcgctggaggaacagaagatcgtggcgcttcaatcggaacaggtatttcgcaatcctgtaaagcacaaagtgcgggaaagggaagaagtcaggcttacggatgagcagcggcatgccatcggcgtattctgggatgactatagacagggaaagcgggaaaactatcttgtatatggggttaccggaagcggcaagacagaagtctatatggagatgattgacagagtgctgaaggaaggcgggcaggccatcgtcctgatcccggagatcgcccttacgtatcagacggtcatgcggttctatgggaagtttggcgaccgggtgtccatcttgaattccaggatgtcccagggagagcggtttgaccagatggaacgggtgaaggcaggagaggttgacgtaatgatcggcccacgctctgctttgtttacgccatttcccaatctgggattgatcgtcattgatgaagagcatgagaccacctataaaagcgagcaggttcccagataccatgccagggagactgccatgatgcggggaaagatggaaggcgcaagcgtggtgctgggttcggctactccatcgctggaagccttctatggctgcaagaggggacgcatcaagatgctggaacttaagaacagggctacgctccgggaactgcctgcggtgtatgtagaagacatgcgtaaggagatgaaggcaggcaaccgttctattttaagcgaccatctgaaagaactgatggaggagcggcttaagaaaaaggagcagatcatgctttttttgaatcgaagaggatatgcgggctttgtttcttgcagagcctgcggatatgtagtaaaatgtcctcattgcgatgtatccttatcggcgcataagaatgggaagatggtctgccactactgtggatacgaagaaccccaagttaatctgtgtccttcctgcggctcaccgtatatcgggggcttcaaggcaggcacacagcaggttgaagaactggtgaagcggcagtttccaagcgccagggcccttcggatggatatggataccacaaaagccaaggacggccatgaaaagattctggagacattcgctaatgaagaggctgatattctgatcggtacccagatgatcgtcaaaggccatgattttcctaatgttactttggttggaatcctggcagcggatatgtctttgtattccaatgattaccgggcaggcgagcggacattccagcttctgacccaggcggccggaagggccggaagaggaagcggcaaaggggaagtcataatccagacctacagcccccagcactacagcatccagatggcggcggcccaggattatgaaggattctataaagaagagatggattaccgggaattgatgggatatccgccggtggagcagcttcttgcagtgctgatgacaggggcggatgaaagcatgcttgagacggcggccagatatttgaaggaattcgcgcagcttgcggataaggataaggaacttcagattatcggcccggccagccccaatgtggcaaaggtgagcgatgcctaccgccgagtgctctacttaaaaggcggggactataaaaggctggtagaggcgaaaaaccggatggagcagtatatagaaatcaataaaggatttcagtcgctgagaattcagttcgactttaatcccatgaatgtattttagaggagagaagcgtatggcaacgagaaagatcagagaaatcggagacgaggttttgacaaaaccatgcaaggaagtaacgaagataacattaaggaccaaagtactcatcaatgacatgctggatactatgtatgaggcgcttggcgtaggattggcagcgccgcaggtgggcgtgcttaaaagaatcgtggtaatcgatgtgggggaaggccccattgtgctcattaacccagagattatagagacctccggcgagcagtccggggaagaagggtgcctgagcgtgcctggcaagtcaggaatggtgacgcgcccggattatgtgaaggtgcgggcattgaatgaagacatggaagagattgaattagaaggcgaaggacttcttgcgagagcgttctgtcatgagatcgaccatctggatggaaggatgtatgtcgatctggtagaaggagaattgcacgacgtgaattatgaggaggaagtttagatgaaggtcatattcatgggtacgccggagttttctgtgggaacgttaaaagccctggcagaggccggacatgaggtggtgctggcagtcacgcagccggataagccaaaaggaagaggcggcaggatgcagtatccgccggtgaaggagatggcgctggagtatgggattccagtattccagccgaaaaagatccgtgcgccggagtgcgtagaagaacttcggaaatatgaggcggatatcatggtagtcattgccttcgggcagattcttccgaaagagattcttgagatgacgccttatggctgcgtcaacgtccatgcgtccctcctgcccaagtacagaggggccgcgccgatccagtgggcagtcatcaacggggagaaggtcaccggggtgactacgatgcagatggatgagggactggataccggggatatgcttttaaaagaagaggtgatactggacgaagaagagaccggaggaagcctgcatgacaagttggctgaggcaggcgccaggctctgcgtgcgcaccttaaaggctctggaagatggaagcgccgtaagagagaagcagggagaaagtcccacggagtatgcaaggatgctgacgaaggaactgggcagcatcgactggacccaagatgccttatccatcgagcgtctggtcagaggcctgaatccgtggcccagcgcctatacggactggaatggcaaggtcatgaagatctgggaggcaaaagtcatggaaggcgagacgggcaaggctcccggaaccatcgtaaaaatagaaaaagacggattcctggtacaggcaggagcgggacttctgaaaatcctggaactgcagatcccaggcaagaagcggatgaaggcagacgcgtttctgagaggctaccaggtggaagaagggtcgatgttggcctccaatatctgaggaaatcattaataattgttaaatttgtatgaaaagacgtttttttgtcgggttttcatatataataacaaatatattttttaaaagcaggaggcgtataaagtatgtattatcctatgttttttgaaccaacatatatgctggtcattataggcgtgatcatctgtctgttggcttcttccaagatgaagtcgacatttaataaatactcccgtgtcaggaatcattccggcatgacgggaagagaagcagcagagcaggtcttaagaggggccggcatctatgatgtaagagtcgagcatatttccggagatctgacagaccattatgacccgagaaccaaggtgctgcggttgtcggatgccacctataattctacatccgtggcggcagtgggtgttgcggcacatgagtgcgggcatgcaatccagcacgccacagggtacgcgccgcttaagatccgcggggcgctggtgccggtggcgaactttggaagcgcgatagcatggccgctgatcctgatcggcctgctttttagcagccggtcgtccatgctgtttttgaatctgggaattatagccttttccttggcagtactgttccagattgtcactctgccggtggagttcaatgcgtccagcagggccatccgtatattgggcagcagcggcatgttatatgaggatgaagtagatgctacgaaaaaggtgctctctgcggcggctctgacgtatgtggcaggcgcagcctctgcaatcctgcagcttctgcgtattatactgctggctaacagcagaagggattagatggaggaagaagaatggcagcatctgtaaacgggcgggaactcgtgcttgatatactgcttcagatcacaagagacggggaatatagtcatattgcccttaagaatgttctagacaaatatcagtatcttgataagaaagagcgtgcatttatcacgagagtggtaaatggcacgcttgaacatatgatagaaatcgactatatcattaatcaattttccaaagttaaggttcagaaaatgaagcctgtcatcaggacgatcatacgcagcgcggtataccagttaaaatatatggatagcgtgccggattccgctgtcttaaacgaggcagtaaaacttgcttcaaaacgcggattttcaacgttgaaaggatttgtaaacggggtgttaaggagtgtgagccgtaatctggaatccgtcgcgtatccttccgaggaagacaggcttgcgtggatggagattcgctacagcctgccccagtggatcctaaagcagtggcttgcatcatatgatgaagagacggtaaagaggatagcagaagagttcctgaaagagaagcccatcacggtgagatgcaatctggaaaagattacaaaagaagaactgctgaaactactaaaagaagaaggcgttacggtggaagaggagccagccgtcccttatgcgctatacttatcgggatatgaccacctggcaggattaaatagtttccgccaggggtactaccaagtgcaggatatcagttcgatgcaggtagcccggtgggcagcgcctaaggcggacgattatatcattgacgtgtgcgcggcgccgggaggaaaggccatccatctggcagaaatactggccggaaccggtcatgtggaagccagggatctgacggagtataaggtagggctgatccgggagaatatcttaaggagcggccttcataatatagaagcagtctgtaaggatgccacggttcgagatgaagcatccattaaaaaagcggatatcgtcatagccgacctgccgtgttctggcctgggcgtgctggggaaaaagccggatttgaagagccggatgacagaagagatgcagaaggaattggcatcgctgcagcgcagtatgctaaaagtcgttaaggagtacgtaaagcctggcggaaaacttctatacagcacttgcacgatcagcagagacgagaatgaagagaatgcaagatggttaacggaaatagatcccaagttccgcctgatccgccagaagcagatgcttcccggaagggatccgggggatggattctatatcgccatgttccagagggagaatgatgagtaagaaagatatatgttcttatagttttgaagaattgaaagaagagatcgcacgaattggagagaaggctttccgcagtactcagatctatgaatggctgcatgtaaagctcgcagagagttttgatgagatgaccaacctctcaaaggagcttcgggaaaagttgaaggaagagtatgagattgcaaaagtcaagatgattgaccatcagatttccaaggtagatcctacagaaaagtttctgtttgaattgtgcgatggcaatatgattgagagcgtgctgatgaagtataactacggcaattccgtatgcatctcgtctcaggccggatgccgcatgggatgccggttctgcgcctccaccatcggagggctggaaagaagcctggctccttccgagatgctcaggcagatatatcagattcagaagatgacgggagagcgggtatccaatgtagtcgtcatgggtactggggagccgctggataattatgataacttcgtgaaattcatccatatactgagcgatgagcatggactacatatcagccagcgcaacatcacggcctccacctgcggcattgttccgaatatgaagaggcttgcggatgaaggtcttcagatcacgcttgccctctccttgcatgggtcgacccaggagaagcgtaagaggctgatgccggtggcagaccgatacgagcttccggaagtcctggatgcctgcgattactattttgaaaagacggggaggcggatcacctttgaatatagtctggtagaaggcgtgaacgatcagatggaggatgccagggaactgatctccatattgaggaagcgaaattgtcatctgaatttgattcctgtgaatccgatcaaggagcgggacttcaagaagccggacaggaaaaatgcccttgaattcaaaaataaacttgaaaaaaacggaattaatgttactataagaagggaaagaggctcggatatcgacggagcctgcggccagctgcgcagacgccatacggccgcgaatgaaggagaaccagatgaagatatatgcaatgactgatgttgggagaaaacgcgagataaaccaggactacgtatatgtgacggataagcccatcgggccattcccgaatctccttgcggttgccgatggaatgggcggccacaaggctggagacttcgcgtccaaatatacggtgaaggtattgcgggaggaattagaggatacgcctttggataagccggaggagatcttgcgcaacgtcgttggcattgcaaatcataagctgattgaggcagcatctacagacattaagctggaaggcatgggcacgacactggtagtagccactgtggtaggcaatacgctttattttgccaatgtgggagacagcaggctatatctgatcaacgataagatccggcagatctccaaggatcattccctggtagaggaaatggtaaggcttggaggcatcaaggccgaagaggccaagaatcacccggataagaatattataacgcgtgccattggagtcaaggaagatgtggaggcagacatctatgaataccgcctgaaaaaaggggatgtcattttgatgtgtaccgatggactcagcaacatggtggaagatgaagatatgttcaatatcgtcaagggttcccgggatgtggtagaggcagtacagatgttgattgagaaggcaaatagcaatggcgggagagataacataggggttgttatagcggagccacttgcggatgaggtgagtatatggtaaaaaatggtattattcttggtaaaaggtatgaagtgataagtaagattggagcaggggggatggccgatgtctataaaggcaaagaccatatgctcaatcgttacgtggcaatcaaggtcctgaaaaaggaatttaaggaagatgagaattttgtgcgcaaattccgttctgaggcccaggcggcagccgggctgatacaccctaatgtggtaaatgtgtatgacgttggggaggaccgcgggctttactatatggttatggaactcgtggaaggaattacgctgaaggaatatatagataagaagggaaggctttcccataaagaaaccataagcatcgcgatccagatgtgtaccgggatcggcgtagcccatgcagccaacattatccatagagatatcaagccgcagaacattatcatatcaaaagacggcaaggtaaaggtaacggactttggtattgcaaaggccacgacatccaatacgatcagttccaatgcaatgggttctgtgcattatacctctccggagcaggcaagaggcggattcagcgatcagaagagcgatatctactcaatcggcattaccctgtatgagatggttacgggacaagtgccttttgacggcgactctaccgtctccgtggcaatcaagcatctgcaggaggagattacccctccgtcagagatcgtgccggacataccgtacagcctggagcagattatattgaaatgtactcagaagaatggggagagaagatacaggaatacgggtgagctgattcaggacttgaaacgttctctggtagacccggacggtgattttgtggtaattccgccactgggtaacgcggatacggttattataacagatgaagaattggatgatatccgcagttcttatgatgacgaagaggaatttgacgagtatgatgaagatgaatatggcgacgaagaggaatttgacgagtacgacgaagatgacgacgagtacgatgagtatgatgacgatgaggagtacggcggaaaaggaaagaagggcaagagttccgatgatgtaaacccgcgcatgaagaaggttatgaagatcctgaccatcgtggtagcgattattatcgtgttcatcctggtatttgccatcggcaaagcagccggcatatttaaaggcggatttggcattgatacggttgataccgatgagaagacaaaggtgaaggtgccaaatgtagtgggaatgacggaagacgaggcgaagaagactctgaacaaaaagggactgggcttcaaagtcgttgccagagaagaatccaagaagtatgaggaaggcacggtatccaagcagaagacggaggctggcaagcgggttgccaagaatacgaccattcaggtagtggtaagttccggccttgtgggagatgagatcacagtaccgaatgtcagcaatatgagtgagagcgaggctcagaaggcgctggaggatgccgggtttgagaagatcacatcggattttgcatacagcgattccgttgccgagggagatgtcattggcacgacgcctgcggcgaatgccagggctaccaaggacacggagattgtcatgaaggtgagcaaaggctcagagaagaagacggtgccgaacgttgtaggccagcaggacggagatgcccagaacgctattactgccgcaggactgacggtaggtacggttacctatgagtattatgatgacgttccgaagggccaggtagtatcccagacggtggcgggcggcaaaaaggttgccccgggtaccagcgtaggactgacgatcagcagcggaccgaagccaccggagaaggtaagtgttccacctgttacaggcatatcgattgaggaggctagagccttattagatggtgtcggattaaaagcagatatcaagtatgattctgaaactgtaggaacggtaggccaggtaattaagtgtaatccaggcgttggcacacaggtggatgagggaagcactgtcacgctgatagttatcagcaagtcatcccagcccgatggcggagagacggaaagcacccagtaaccgaggcgaaagaagcagacaggatagatatatgcaaggaaagatagtaaagggtattgccggattctactacgtacatgtagtagaatccggtgtttatgaatgtaaggccaaaggcgtgttccgcaaggagaagattaagccgttggtgggggataatgtaattatagaagcgctggatgaagagcagaagacgggaaacatcacggaagtcctgaaaagaaagaatgaactggtacgtcccgcggtcgctaacatcgaccaggcattggtcgtatttgccatcgtaaggcccaacccgcattttaacctgctggaccgttttcttgtaatgatggaaagtaaggagataccagtgattctctgttttaataaagaggatatcgcaaccgatccgcaggtgaaggaactggaagccatctatgagaactgcgggtatccattgattttcaccagcgctcttaaagataagaatattgaccaggtgaaggaagtgctaagaggaaagacgacggccatcgcaggtccatccggggtgggcaagtcatccattatcaatatccttcagcccgaagccaatatggagacgggcgctatcagcagcaagatcgagaggggaaagcacaccaccagacatacggaattatttccggtggatgcggattcctatattatggatactcccgggtttagctctctgtatgtaaatgattttgaaaaggaagaactgaaatactattttcccgagtttgcagtatacgaaggcacgtgcaagttcaatggatgcgatcatatccatgaaccgggctgcgcggtaaaggaagccgttgaggaaggaaagattcataaagtacggtatcagaattatatagagatgtatgaagaactaaagaataagaggaggtattgatgatggagtatatattagccccgtcaattctggctgcggacttcaagaatctgggccaggagatgaagaaaacagaagaaaatggtgccagatatctgcattttgacgtgatggatggcatgtttgtgcccagcatatcctttggcatgccggtgctcgcatcagtaaagggtgggacaagccagacgatggatgtacatctgatggtgcaggagcccatccgttatgtggaagcatttcagaaagccggcgcggacatccttacagtgcatttagaggcatgtgaagatgtgaaaacgacaattgataagattcgggaatgtggtatgaaggtcggcctgtctatctgtccggagacggaaacggaggcactaaagccttttcttgaggatgttgacatgattctggtgatgagcgtccatccgggattcggaggacagaaatttatcccggaatctcttgacaagatccgcaaggttcggggaatgatagaagaacaaggactttccgtagatgtggaagtcgatggagggatctaccttacgaatgtccgggaagtgctggaagcaggagtcaatgttgttgttgcaggctcagcagtatttaagggcgagccgggacagaataccaaagagtttatggagatattaagggattatgagtaagaggattgttattgtaagcggcgggcagctggatgaggaactgacgctttcaattcttaaggatgagaagagccagtgtattattggagtagataagggcgtggaatttttgtatgctcaccagatcatgcccagttatattgttggagactttgacagtgtaaaagaagagattgccgattattacaggaatgagactaatgtcccgatccgggaattcaatcctgtgaaggacgcgtccgatacggagatcgcggtcaggctgtctcttacgctcgggtgcagcgaactgattattctgggcgccacaggcggaaggatcgaccacctttgggccaacgtgcagacccttaccattccatacaaagcaggggtggatgccaggatcatggatagccagaatatgatctgcctgattggaggcggtgatacgcatatccgcaaggatgaattatatgggccgtatttttccgtattcccgctgggcgaagagatctttggatttaacatagagggcgcaaggtatccgcttagaaaccatacgcttacgccgtacgatagcctgtgcgtcagcaaccagattgcggaagacgaagaagaagtcgtgatcagttttccgtccggcaccgtaatcttgatggagacccgtgacaagagagaacaaaagtgataaactactgtatgttctgaagaataatgaagcatgaagagaggagctatagatgaagttaggaatcataatatacaggacggatttcataagtctctataaagtcaatggaagtctacaaaacccgataaaataaagatttctgccgaaatggtgtaaggagttaataaacatttataggaaagagcctatgcaacgaattatacacaatgaatatattggaaagattgattgggatgatataatgaatagtgtttgtcaatgaagaagtggaactgctgacaaatctgcattacttcaacgttatctctgaaaaggaaaccggccccccaaaaaacgggagccggtttcctttgtatgaagaacaattcggatttttcttacggttcttcccatcccctatctcctttcttgtctggcggtacatcttaatcaggcatttcctttcccatctgtctggccgctgaaagcaaccgccggtatccgtttctctgtcagttcttacgtttctcctgttccgcatagcagcagtttattttacttgcttctgcatatatgtcccaaaaaacggtgcggagaaaaactccgcaccgccttgccatcaattatttcatgcgtttaccatggcagattcgctttctggagaacaggaacagagttcccaatccgccgatggataccgccatcaggacaatccagagggcaagattgctggtgtcgcccgtctgcgggacattgctgattggcttatccgcagttttgctgcctgtattgccgcccgtctgattgccgacggaagtaccagttgccgggatttccacagccgccttcttgtagccgcagacggagcattcctcgtgcttgctgccagcctcggttgcggttgcgtttttgtcaatgatccactggaaggtatgggacgcagcatccgctttttctccgcaggcggtgcactcatgccagtggttggtatcgtccgatttccattcggtgccgtaggcatggctggtagcgggaatcacggtatctgccagaacgatctctttggtcagcgcctcgtcggagaagtacttcccacagtcggagcggtaccagtaagcagtattgcccgcctcggtgcaagtggcttccttggcttccgtcttcacggcgctgtgggtatgcacgccataggtgccgtcaccattcgccttgggcgcgaagccatccgcgcagtattcctcgggaacctcaacggagtaggtaccgccggcgatgctgaactccatattgcttggcttgaggagctgccccctgaaggtaccgccagtgatggttgcggttgctgtgccggtagtaccgacaggctgcccaaacagggtcacgccgccggtgaaatcgccgctggtgatggtcaactgacccacgtcagcatcaccgcagttgccgttgctgacaaccgcaggagtgctttcgtcagccttgaaggtaccgccggtgatggtggccacgttccagttcaggatggtggcaccgttggaggcattggtgtagaaagagccgccggagatgttcagggtgccgaagtcatcgttcttcacggcgttcatgccgccggtgacggagccgctttttacagtaagagtaacattagcttctgtcggatagctcacattgcagtcattacccagattgccatagtagccgttgtcaatggcgctggagccgatgtcttcctgctttacggctgcgccatcaatggccatggcgcctaggttcttaatgacataccacttggagccggtgaaggtgccgccattcagggtggcagttgcgccgggggcgttgtacagcgcgcccttgccggaggtagagccgccgtccactgttccgctgctgtccgaactattgtctgtcactgtcagcgtcccgttattggtgatagcgtgatcattggcactggagatagtttttccgttcagatcgattgtcacgttagtaccttccggaatggtgacatcagacgcatctttcagaaacttcacggtcccgccgtctttggcagtttcaatggcagtagccaaggtggtgtagtcaaagccgttcacttcggcaactgctgtattggtatccgttccgatggaataagttccatcaccattatctaaggctgttgtttctagcgcattgccggtattgacagtttccgcaaacgctgtactactaagagacagtatcataacagccgacagcagaatcgccatgattcgttttttcataatcattcctcactttcaaaatagtttttcgcttctatacgttctggatggcctaacaggcagatcagccgctcccgtgcggcttctggtgtgtcttggggcgggccgttcaccagatacgccagtgcgtcgttccactcaaacagggaagccgcgcttgttgggatttgttcaatttcccgcgccagccttgcctgttcaggccggttcaaaaagcgcagatcagaaagatggctgcagcacgctttctgctgcaatgcgtccaacaatgacatttgtaccgccataccattctcctcccttcttttgcagttttccgcagcagcatttatcataaggtacaccttttgaaagcccacagatactttttaattataatcgatgcagtcggaattttcaatagatttcacgaaaattgacgcactgaaacccactttttctgtatcttttgtcggggaggatattgcaaaagccggacaacggcatttatcaaaaggtgtaccttatgacagtccgctttctttctgccgtttgttcctcagccggtattccctcagacgccggtaaaaggtggcctcgctcatgccgcactgttccaatgcggcggaaaaggaaatctgctgtttctccccttgccgcacaatccgcccgaaattatcgggaaccgggatttccggtctgccgaatctcacgccttttgccttcgccgccgcaatcccttccgcctgcctctttttaatgttctcccgctcgctctgcgccacaaaagacaatatctgcaatacaaggtctgcaataaaggttcccatcaggtccttgccgttcctcgtatccaaaagcggcatatcaaggacgcagatatccacgccgatctcctttgtcagtacccgccattggttctggatttcctcatagttccgtcccagacggtcaatgcccaggatatacagcaaatccccggctttcagtttctttactagtttcttatactgggggcggttgaagtccttccccgactgcttatccatatagatattcattttcaccacacccttttctttcagggccaaaagctgcctgtcctcgttctggtctgtgctggatacccgcacatagccgtaactgttctgtttcacggcttcgcctcccttcaaaaaattgtattactatatcttgacaaactatgttcttatagatacaatatatagcgcataaaggatttggctacggactgtatgcagagccgcagccgctatgtttcagagaatgaaagtttcctgccgtttcaccggcacaagtgttttaaaggatttatggggtaaggggtagtgtccccttttgctggaaataaaaaatgaatacagcgtttcaaacgcatatgttatgagagtactgctctttagccgtgctcatttgttttatatatcaaccgccggaggtttttgcaatcgttacctgtcggcatttcagacgaaggaggtggtgcatatgcaggagaacttgttgtatccctatgattgcatactcgttgttctatcggtacgtcacaccgcttacgccggacgaagcgggggatttaatggcaagggcggaacggtccgtttccccggcctcctcctgctatgaggcataccgggagcggttaatcctctattcggaaaaagaaacccagtatggggcggactgcaacttcctgttagaagcggatgaatatctgcgggaacggaagctgcccggtctccaaaacgtgaacggatattaaaatttttgtcagtatagcaaaaaggaaagcccgccagttattccgtgcaggaatagttgacgggcccttttttctgttacactgaaatctacagttattgcagatacaggctattataatggaacggaaatcaaaaaatgtgttgatgctggaatgaatgtctatattaaaaaaactaaagctaataatgctactaaagataatgaattccgtaaagaaaagattatatatgacactaagactgatgaatacacatgtccgggtggatataaacttgcattttttgaaaacacatcaaaaaatggcatgaaatatcgaaaatataaatgttccgattgcaattcttgcaagtataaaaaagactgtactacttcttcgtctggaagaaccgtataacgttgggagcatgaagatgttttggaaactgtatataagaaaaccatggataataacgaggtttataagcagaggagatgcatcgttgaacatccatttgggacgataaaaagaagccttggatatagtttctttcttcgatgcagataagaaaatgttgatgcagaagctgcatctatgtttatcacttataactttaagcgattattttgtatgttttcaacacaagaattaataaagaaatttgaataattcataaaaaggcggaggagtaaatgtgtaaattttattaaaaacaaagaatatatgatggtagtatagatacatgacactaaaaaataaaaaagcaccgtaaatcagactgacattgtaaatcgttagacagtctgacacacggtggtgtgggagttcggtagataaaataattatctacccgattaaactttatagtattattttgtgcatattttgtcttatatagtatatggaataataagaaattgaatcctataatgctttatagaaagcagcatagaactccatagtgcatattgcggcgcaaaacggccgcattctgtttctgaacagccgatatatacgatgtctaggtaactactccgatataatgatggtagccatcagagtgctggtgaatacatcatttttaagtaggattatgtatacagctagattacaaagacatcattatcaaacattacgcactgtccatgtcaggcagtgaaatagcccgtcaaattggagccagcatatctggagttaacaacttcttacgggctttcaagaagtgtgaggacctatggaattgctataagaaaaaatgtgaagaagaaggtgcccgcttctatcagtacagtcagtattgtgagttctacaacagatggtgcgaagagaattatgaaacagcgcacttcaatgccgtgattgctcagaagatggaggttgatttcgcaggccagacattctctatgactgatccacttaccggtgagatcctgacgattgttgtgtttgtagcaatcctgccatattcacagtatatctatgctgaaggaatgctctccacaaaggaacctcagtggattgatgcgaataatcatgcactggattacttcggtggagttccggcattagttgtctgtgataattgtaagcaggctgtcatcgttaatcaggattggatcgaaccagaaccaaagttcaagagctatgtagaaaacgcaacaggcattcttgagaaaggtttcttccataagcttgaagaacgacagtatttctctctagaacagttcaataaagatctctggaaggagctggatgctcttaacaagaagccattcaagaagaaagaacacaatagatcctactattgggaagaggagaaacttgaattgatgacgcttcccaccatgcattacgagtacatggagagaaaaacggcaaaggtatcaagcgattttcacgtacgctttgacaatgcttattatagcgtagataaatcgtttctgcataagacagtatccattaaggcttcgtcggccgttgttcgtatctattctcttgctggggtattcctgtgtgaatggccaagagcaactcgcaaaggtcagtggtcaaccaatccggagcatctgccggataactataaagggtttactcagtggaacggtccttgctttatccaaaaggctcagttcattggcaagaatacagagaccgttatccgaacgattcttcaatccagacagtacgaagtccagacctatcgaatgtgcctggggcgattgcactgaataaacagaaatatacattttaatgccaccggaagcttccagtattgatattcttttatcccacagtaaagctcttgcggatcagatgagagaggaggtggacgactgatgcttaccggaactgcacttataaatgagcttgttgatgagttgaatgaactcaagctttcaacaatgacagttacactggatgatttgtaccacaaacctggattccttgaaatggacaatcttactctggttgcagaactaatcggaccacagtttcaggaaaaggtcagtacaacgctgaagaatcgattaacagtcgcatatctatagggatgtcctgaagaattaactgattgtgttgattctgacagaagagaatatctgccctctggtataacagaagttctttcatcactggatttcattgaaagaggctataatctttgcattcttggcgaatctgatgctggcaagtcctacttcgcaaaagcgattggtatcaaagcctgcaaccggtataacgtcgtatgctttcacagtgaggaacttttggaaagtatggttgctctaaaagaacaggattacgataaatacgctcgtaagatgaaaaagtatctcaaatgggaactaattatactggatgactttctactccacacgatcacagacgaacgtgaaaccaagatactctttgagctccttgagaagcggtacgaacaacgaaaaagcactatcgtgtgttcgcagcgcgatacagacaactggaaagcgatgatcctaaacgatgaagtatcggcgaactccatcatgaaaagagccaccaaacattatacgattaaaatcaattcaaggtaatcagctgctaattaactaaaatgaacggcgaccgccgtaaactgcaccatagcctttatataatattcaatttattttttcatattcttatttctcttttctgtttttacaatgtcatcataactcagaagagaaataaatacatgccaaatgtgaatgaaaagtagccaattgttgcagacgtatcaagtttcaatcaaacgaaaagaaaggtggaataaaagatgatgagagcttacgaaaatattcagtttacaagtgaaaataggaaatcaccaagaagttactacataccaggtggatgttcccaatatttattattaaatggagagtggaaatttgcatattttaatcgagatattgatgttccagaaaagattaaacagtgggataagataaacgttccttcttgctggcagttatacggatacgaaaatccaaactacacaaacattaactatccatatccttgtgatcctccttacgtaccaacagataatccttgtggagtgtatgaaagagaattcgaacttgagaaaaaatggggtaaagtgtactacctattcgaaggtgtatcgtcttgtgcatacctatatattaatgatacttatgttggattcacacaaggcagccatctacaagcagaatttgatattacagaatatgtaaaagaaggaacaaataaagtaactgtcaaagttttaaaatggtgctgtggaagttatttagaagaccaagatttccttcgttttaatggtattttcagagatacttatattttacaaagaccgtttggccatatagaagacgtagaaattatcccaaataaaaaaaatattcatattgtgtctgaaggtgcttgtgaggtatccattgcttttgaaggcgaagtgttagtgcaaacacagatggaaaatgaatttacttatgaagtggaaaatccagttttatggaatgcagaaaaaccagctctctatgatgtggtattaaagagagagggagaagaattaaagttccgtatcggtttgagaacaatagaagtttctaatcaatatgaattgttgattaatggaatgtcagtaaaacttcacggtgtaaaccatcacgatactcaccaatataatggatggtgccagacagacgaagagcttcgtaaagacttacttttaatgaaagaattaaatatgaactgtgttcgtactgcacattatccacctacacccaaatttatggaaatgtgtgatgaaatcggtttgtacgtaatctgtgaaacagacattgaaacccatggattccttcgtcgtttgccaaatgtagagtatcattttgatatggactctaatgattggcctgcatctacattggaatggcaaggtgaacatgtagaacgtatggaaagaatggtagaaacatttaagaattatgccagcattattatgtggtctacaggaaatgaaagtggtcatggagtcaaccatgtggcaatgattcgctggacaagaaaccgcgataattccagattgattcattgtgaagatgcttctagaaagcaacaaatccacaatgcagacgtgtattcaagaatgtatatcacctttgaagagttagaaaaggcagcggttacagaggatatttgtatgccagtatttttatgtgaatattctcatgcgatgggaaatggtcctggagatgtatatgaatataatgaaatttttgataaatatccaaaattaatcggtggctgtatttgggaatggacagaccatgtagttatggtagatggtgtcgcaaaatatggcggagactttgaaggggaattaacaaatgatggtaatttctgttgtgacggccttgtatttgcagacagatcatttaaagcaggaaccatggaagcaaaggcagcattccaaccaattcgtacatcatgcgaagacggtgtccttagtgtatataaccgcctagactttacaaatcttaatgaatacgactttacatattgggtagaagtagatggagtaaaaggagaagaagtaactctgaatctagatgtagcacctcatgaaactgtaacactggaaattccatacacagaaactacttgccaatatggagtgtatttgaatactagattaacaaaagcagacaaagaatatgcacaaacccaacatgaactttcatataaagtagaagaaactgtaagtgaagcatcccttacattaacagaagatcaatatcatatttacgcttcgggagaaggattccaatacgtattttctaaaatttacggtggatttacaagcatgatcgtagatggagtagagcaattggctggaacaagcaaattctcgatgttccgtgcaacgacagacaatgatgcgaaaatgagaccattctgggcgaatgtgaatatttggcagggggaaaatcttgattgtgcatttacaaaagtgtatgaatgtgatatttgcgatgacaaaattcttcttaagggatctttagcaggaatttctagaaaaccagttcttttatatgatatggaaataagaattacagtggatggaacagtggaaattggatttaatggcaagattcgtgaagatgcaacatggatgcctagattaggtatggaatttactttgactgaacaagcaagtgcattctcttattacggcagaggaccatgggaaaactactgtgatatgagtcactgtgcaagtattggtgcgtacgaaagtgatgtagattctgaatatgtgaattatgtatatccacaagaacatggaaatcatatgaatgtaaaacgacttacattgggcaaattagaattccaatcagaagatggttttgaatgtaatgtttcaaaatatacaattgatgatttagatcgagcaaaacatacagatgagttacatccagatggaaatgttcatttgcgtattgactacaaagtatctgggcttggaacagcttcttgcggacctgatttaccagaaaaatatcgtttctcagaaaaagaggtaacttatagatttaaaattgtaaacttgcataaggagtagttagattggtttcattaatatgaacaaaaagagggaagtgacaaaaatgatagaacagaacctacaaactgctatggggaaacaaagccatctaatcctgaaacacacttgattccactgattcttcaggtacctaatggacaacgcgaacatctttcagtatttggtacagactatccaacaaaagatggtacatgtatccgtgattatatccacgttatagatttagctcaggcgcatatcttggccgtaaaatatcttatggctggaaatgaaagcaatatttttaacttaggaaacggagtgggatttactgtaagagaagtaattgaaatggcagaaaaagtaactggtcaatcaattaaggttgtggaaacagagagccgagaaggggacacagcagtgcttatcctaaacacaacagtctgaaagaaattattcaaaccgcatggaattggcatcaaagccatccaaatggatatagaaatatataagcatggatgaagaaatattgttttgaagaactgtggttgaatcatcaatggctatatcacaggggggaataaaagtgaaaaactattacattaacagcttattacatggtggagattataatccggaacaatggttatatgatccatgcattttggaaacagacattgaatatttaaaaaaagcacatattaatgaagtgacattaggaattttctcatggtcaatgcttgaaccagaagaagaacagtatgattttggatggatggaaacaattatcaatagattatacgaaaatggtatttctgtaatacttgcaacaccttccggagctagaccaaaatggatgtctgataaatatccggaagtattgcgtgtggatgaaaaacgtaatagatttctgtatggaatgagacataatcattgttatacatcaccagtatatagagaaaaaacgagaaaaatgaatacggagctggcaaaacgttttgggaatcaccccggtgtaattgcgtggcatatttccaatgaatatggcggagaatgtcactgtccgctttgtcaggaagcatttcgtgaatggttaaaagaaaaatatcagacaatagataggctgaattttgcgtgggcaactactttctggagtcacagatacaacggtttcgaacaaattgagagcccttcattatgtggagaatatgggcttcacggtttaaatttggactggaaacgttttgtgactgacagaacggttgattttgtacgtcatgaagttaaggcaattagagatgcaggttcagaaaaacccacaacaatcaatatgatgtatgactataaggggctcaattatcataaattcaaagatgttgtagatattatttcttgggataattatccacagtggcataaaaaagcagaatatttaactgcaatggataatggaatgcaacatgatattatgagaagcattaaacatcaaccatacttattgatggaaagttgtccagcggctacgaattggcaacctgtgagtaaactgaaaaaaccagggatgcttcatcttgcgtcattacaggctattgcacatggttccgacagtgttcagtattttcaattgcgtcagagcagaggttcttcagaaaaatttcatggggctgtgattgatcattacggaggtagtgatacaagagtatttgatgaagttactcgagtaggtaaatctcttgaacagcttcaagaaattgttggtacgcaggtagaggctaaagtagccgtgttgtttgactgggaaaatcgttgggcaatggaggatgcacagggaccaaggaataaaggcctatattataaagaaactgtagaaaaatcatattatgcatttagaaaactgggcttagatgttgatgtgattgacatggagcaggcattggagtcatattcgattgttgcaattccgatgttgtacatgttcagagatggctttgaaaataaagtaagaacatttgtagaaaatggcgggactgtaatcatgacttattggtcaggaatcgtagatgatacagatctgtgttatctcgggggaacaccgcatggattgatggatgtatttgggattcggagtacagaaattgatgcattatacgactgggaaagtaatacttcaatccctgtaaagggcaactctttgaaaatgacttcggaatggaaatgcaaaaatctttgtgatcttgtaaaaactacttcagcagaagtgttagcagtttatggagaagacttttatgcgggaatgccaacagctacaaaaaatcggtttggtagaggcaatgcatattatatttgtgctgatttcgaacaaggattttatgatgaagttattaaaaaaatcgtaaaagattcaaaactttttgtacctgtaaaaagcattccaaatggtgttgaagttacaacaaggagttctagtgaaaataaatatgtttttattcagaatttcaatatgcattccgtcaaaatggaaattgatactcgaaattctcaaatcattttagggaattataaaaaatctacaatagaaggttttgatactattgtcttaaaactaaaaagataatgcgttcctatatggtagtaaactgattaaggatgcgtaaaatggaaaagcagagtaggggcaattgtttcgaaggtttaatttatcccaaggaatacattcgaaactatgaaattataagagaaaaatataaaccagggaaaaataagaatacaccttattattctaaatggatgaaaattggcatgtgtaaaagtggatatggattcgtaaattcagaaggaatgtcatattcatatagtccgggagattattttgtaatcttgtcaaatgttgcatacacagtcaaatgtgaaagcaaagatgataccctatgggaaagtgtattaatagatgaacaggctgttggctccttttttaatacttgtaataaagtattattggaaacaatgattcaccaaaaaaataaaattcaggtgtttaactatttggataaacctaaaatagggttgtcgattcatctgttatttagtgaacttgaaaatataggacttatgcagtatgaaattttgaccgggattatacaaatactaattattaatattattagggattttcaaggggacgatataaacaatgaaaaagatagaaaggatagttttgactatatttttccatcaattcaatatattatggatcattacaatgagacgatacgcatatcaacattagcgaaagtatgttatatgagtgagtcttattttaggaaaacattttatgagtgtatgcatgtttcaccttcagaatatattaatcgatatcgaattgataaagcttgtgaattgattaaaactacaaatcaatcaatagatttgatatcttcaaaagttggatttcaatcaaaagcgactttttatcgaaattttaaacagcagaaaggatgtaaaccgtttcagtggaaaagtaacgatttatcagagtgaaaataaaacacgattttatattttacaattgaagtattaatttcaaaaaaatgtggtgaaaatgagagaaaatgtattgaaattgaaaacattttaacaaatgcgtttgttaaaataagttgaaattatataatagtccatatccataaaaacggactataataacttctcggaatctcaatgaatgagatcccaactgaaaattgacaactgaatatcgtgcaggaaaagaaatttgtgagaaatggacataaacgttggacatagcgggtactatgccttgaaaaattctatcttggattgtcgtcggtaaagatatgtacggtcctgccgtatttcgccggtgaacagggatattcacagaagcagccgtacttccgattggcttttggacaccggcattttgcccggtgcttggcagcctcatatccatccttatgcatacgtaagcccatcttacagatcaggacaccatcgtcatcaatggtgaaatcatccttataagtaaaatgtccggtatgaccgggattaaggtcaataaagggtgtgatatttacctgtctgcagtatttatagacagggtaagtatcttgtgcggaatccagaagaagtttttcaatgcggaattccggaaggtatgccttcatggtcaaaaaggaatggagaagtgaaagcatgtcatgccgggaagcccgttccaaaagtgggaatatcgggaggtcgctgtaggaatcggatgccacatacatgtagaggtggcagccgaagaaatagtattcccgatgagagtcccatccccagttgcagtcaggctgagagtattgacgtttacagttacaggaaaaacagccgttttccttacaatcgcaggttcgcttttttcgctgttatgcggaagtgcggacaggagtgccgtcatcggcaagtgccggatggtacggatcaatcagccctttgcggacagaaatacttaggaactgctgtttatagagccggaaaataagaaaaaaaggattttccggtttcaactgccagcgttccagcaaaggaagaagtttagaagcgatgcttgaagaatcgcaaggagttttatcgcctttctttttagagtatccccgaaggggaatccacttaagatagcgtagagaggagtttccctgagcatgcggcaccagatagtgatggaagtcaagaaactagaactgcacgatataatcccaagtacttttagagagtgcaaaagggtcaggataaaatttaaggaattcagatacgaaagtatcttaataagcggcatggccaccagtattaacaggtaacataataatcgccttcagtcgattgaaatagaatataatcaatcggcttcgccgcaaattttgggagatttgtcaagtgttttcgacaaaaaaagtgggtgatttttaaaataaggattctgaaagccttatggaataagaggtgaagattccgagaagtattatacaataaaggagggtttcttttatgaaaaagatgggtaaaagaattatggcagtttgtatagtgattgttatgatgctcagtttagttgcatgtggaggctctaagagcgagaagggttctgcaaaagatgaaaatacgcttactgtatgggcatgggattcgcagttcaatctttatgctatggaagaagcagcaaaaatttatcagcagaaaaatccagatttcaagctcgaaacaacagagattacatgggatgatttacaaactaagttgggaacaattattggttctggagatttttcgcagctcccagatatttgtttaatgcaggattatgcatatcagaaatatgtaaccatttatgatggattgttccaggatataacggattgtgggattgacttttcgcaatttgcagaaggtaaattaacagcttctgttgttgatggaaaaaattacggtgtaccatttgataatggagcagatgttgcaatttatagaacagatattcttgaagaggcaggatatacaattgaagatttgaccgatattgattgggatagatttattgaaattggtgaagatgtttatgaaaaaacaggatattctcttctttctgttcagacaggtggatcagatcttatttatcagatgatgcaatcagcaggtaagagtacatggaatgaagatggaacaccaaatattgcaaataatgcagatttaaaacagtgtttggaaatttataaggaaatggctgacaaacatgtaatggatgttagaaatagctgggatgaatatgtggctacatttacaagcggaaaaacagcaggtgtaatcaatggttgttggattatggtacagcttcagagtgcggaggatctttcaggaaaatgggctattactaatatcccatcattaccaggtgtagaaggtgctacaaactacacaaatcagggtggatccacttgggcaattacatcaaactgtcagaacgtagaacttgcaacagattttcttggaagtacttttgctggaagcacagaattatatgatactattcttccaggcgcaggtgcaatttcaacatggctaccagcaagtgaaagtgaagtatatgctgagccacaggaatactatggaggccaagcggtttacaagttgattgcggaatttgcttcaaaggtgccaactgtagatttgggtgtatactatacagaagctaatactgctttagctacagtagttgggaatattcttggaggagcagatattgattctgaattaaaaacagcacaggatgatgtagaatttaatatgagacagtaacatggattatataggggaacaattgaaaattgttcataagttccccttttctaaatttaagaaagatttggtgcaaatatgagtagtaaaaaatatcgcaaaaaacaaagattaaatcttactggatggggattcctgatgccggcgatgattttaattacctgttttagtttatatccaatgattagtgcttttattacatcgctgcaaacaggaactgggacacagcttactttttctggattaagtaattatataagagcttttcaggacgatgtgtttgtacagtctataaaaaactgtctgttttatttgattatacaggttccagtaatgcttgttttagcattagtttttgcaagtgcgcttaataatccgcatttaagatttaagggattttttaggacatgcatcttcctcccatgtgcaacatcgttagttgcatatgcaattgtttttcgatctttgtttgcaaacgatggatttatcaacacaatgttgataaaaatgggaattttagacgaagcttttaattttttagccaatcccactagtgctaagatagtaattattattgcgcttgtttggagatggactggctataatatgattttctatttagcagcactccaaaatatcgattcctcagtttatgaagcggctaaagttgatggggcatctcctgttcagacattcttaaaaatcaccttgccattgttaaaaccaacaatattgatgactgcaattatgtcaacgaatggtacactgcagttgttcgatgagtctatgaacttaacaaatggtggtccgggaaatgcttctattacaatgtcacattacatatataatacagcatttaaaggtgttcctaattttggatatacttctgcaatgtcatttatcattttactgatggtagcagtacttgcatttatccaattgaaagtaggtgaagacaatgagtagaaaagtaaagaaatttggaatgtattttatgttaatagtagtttcaattatttctattttccctattttttggatggtaatagcttcaactaatagaagtgtagatgttattggaggtaaactcacggtaggaacatatttattggaaaattataagacattggtttcacagcaaccgatatggggaaatttttggaattcatgtagatacacagttgcagtcactgtgtttgctttgattataagttctttggcgggctacggatttgaaatatacaaagataaaaagaaagaaaagatatatgcattggtacttataacaatgatgattccttttgtcgctctaatggttcctttgtttaaaatgtattctaaacttggtttgttaaatactgtactaggatttatgttaccatcacttgcaacacctctgttaatcatgatgtttaggactaatgcaaaggcatttccaccatcaattattgaggcatcgagaatagatggactttcagaatttggcatattttttagaatgtacatacctagtatgaaatctgtattcgcagcagctggcgttgtaacatttatgaattcatggaataactttttatgggcaaaagttatcatgtcagatagttcgactcagacaatgcctatgttgatttcaaatcttacatcagggtataagacagattatggtatgctgatgcttgcagtattaattactacgattcctaccgcaattgtattctttactcttcagaagaattttgttgagggaattactggatcagtgaagtagaagtgtattagaatgtgagattaagttaaaataatcaactaattaggggggtatagttatgctatggttccccatcaagaagacaatgaagtaaaaaaattcggctgatagccataaggctatcagccgcagactgtagacaaagtccccggcttgatgccggggcttttcttctgcagttatcaaccttgtatctatctttcctctttttatcaagaaaatcgtaaacgtaccatagtgggtatctttacaacaaaacggccgctttcgcgaccgtcgatttactagttatcttttctgatctgtttgggaagatcttgagaccacggaagaagtttatccagaaaagatctgtcggtatcactcccatgtgctctggtatctctgaaagcagatactcaaaataatcgtatggcttcagattgtttgcttttgccgtatctgctgagtattctgtgacctcggagccacttaatccgttatagagagccacccattccgaatgtcagagccgcctgtatcaaaaaggcattccgctgttgagagccacctcttgaagcaatacaatatttttacggatgaatccgtaatactttgagaggaggacaatcgaatgtccaaagagaaacaaattttacagatgcttcagaatggatatagccagcggcgtattgccagtactctgcgcgtatccagaaatacggtcgccagagttgtgaaagcggcttcggaccacgggctatcaaaagatgccctggagtccatggaggaaacagagctccatcatacgctcttccctgaagaagcaatgcttcctacattagttacgcccgatttcccttatatccataaggaattattaaaaaacggcgtaacgttaaagctgttatggcaggagtatgtagacaactgccgggatgccggcaaaccgccatatggctattcccaatactgtaagctatatcaggattatgtcgtgcagaataagcttaccatgcatatccaacctcaacctgttcaccaagtttacgattgatatgcatggtagcacgtcttttctgctcatcctgttggatgtgatagcagaattgagaatacatgagcggctcatcgccgttagcgcggcagtcctccatgtattccgtccataggagttttttactgactccgttacggagcagttccttacggatgtaagcataatcaggcatacgcttattaggtgacacgctgctttctttagaaaacatgattttttgcaactctgtgtcagtcattgattcatcaagtggccatgtgagatttaattctctggcgcgcttttgaacctttacgacagttttctgagcaacaccacagcttgccatgattttgtgttgtgagaatcccagacctgtaagccggatgatttctttgtacttggtcataattgtgtgacctcccttgtaatgaatttacactataaagtgcatagattcattataagggttgtagagaaaacgatttctttggaggtatttttggaaacacaaaaagaaagtgaaggcaagatacttcgatggacattgacaacatcttgttgggatactatctgtaacggagacagaagaaaaacgtaacttcgctacaatcccttcgggaaaacaatttgcaggaaaggagaaaacgcagatgaggaacaagacataatggtcgttctgggaaaggatgatatcgagttgattgaaggctcaaaaggttggatggagcgattgcaaaaattaaaatgcaatgcagaaagcgttggaagattagaaacagaaattgttacagccagagacaaaaagggttgcagtacaggagattaagaaagaagtgaagccgtccattctcaaaaggctagcagaaaaatgtgcttcagaaaatggagaagttagtagaccgaaaggcagtcaaagcaattcgagacactttggaagggacggacaaaagaacaatccgaggaacgatgcagaattacatgaccgttcttcgggaggacccgcttcttgccgggagggagagcagatgggaatccccttttgatagcctgacagagagaaatgccggtatttgaggtcataaagttgtattttgtgctttacgtgggaagaaagaaactcgtgaaacgaaaacagtttgagcagtttatagagaagaagacagaaatataagagttgaaagcggttgaaaaaagagcccgattatgatatgatttataagttatattaggctcttttcttaatataagaaggggttagtaatatgggtaaagacttaaaaggtaagaaattacctgcgggaatctatcaaagaaaggatgggtcgtatttcgcaaggtttacagataagtctggaaagagaagggttgtctgataaattgacatggaattggagtaaaattggagtaaagaaaatacccaatatgccacaaaccttttaaaataaaggtttttaaggaggatatataagaatatgaaattaggaatcgtggggttacccaatgttggaaaaagtacattatttaattcattgacgaaagcaggagcggaatccgccaactatccgttctgtaccattgaccctaatgtaggcgttgtaaccgtgccggatgagagactgaatgtactgggcgagatgtatcacaccaagaagatcattcccgcggcaatcgagtttgtggatattgccggacttgtaaaaggtgcatccaagggagaaggccttggcaaccagttccttgccaatattcgtgaagtcgacgcgatcgtccatgtggtacgctgcttcgaagacggcaatatcgtccacgtagacggaagcatcaacccgctgagggatattgagaccatcaacttggaattaattttttcagatttggaaatacttgagcgtagaattgcaaagactaccaaggtggcaagaaatgacaagacggctgcgaaggaactggctttacttgaaaagatcaaggcgcatctggaagaaggaagacttgcaaagactttcgagggcgctgaggatgaggaagaactggcctggctaacgggatataatctgctgacctataagccggtgatctatgcggcgaatgtagcagaggacgatctggccgacgatggcgccggaaacgtcggagtacaggctgtaagagagtacgccgggaaagagcagagcgaggtgttcgtagtctgcgctcagattgagcaggagattgccgaactggatgatgatgagaagaagatgtttctggaagatctgggattggaagaatccgggctcgagaaactgattaaggctagctaccggctcctggggctgatcagttatctgactgccggagagccggaggtacgggcatggaccattaccaagggcacgaaggcgccacaggcagcagggaagattcatacggattttgaacggggctttattcgggcagaggttgtcgcctatgatgacctgattgaatgcggaagccataatgcagcaaaggaaaagggattaatcaggctggaaggcaaagactacgtcgtacaggacggagatatcatgctgttccgcttcaatgtataggaaggaagaccgaagatgcacagaactattgattttccgaatatagggatacatcttaagtcagtaggcgatcacattactatatttggctttgacatcgcgttttatgggatgattataggactaggaatactgacggggcttttgattgccgcggcagaggcaaaaagaagcgggcagaatccggaggattattttgatctggcaatctatgcggtgatattttccatcatcggggcaaggctttactatgtggctttctcctgggatatgtacaaggatgatctgctgagcatcctgaatatccgtcaggggggacttgcaatctatggaggcgtgatcgcagcggtaatcacggtatttgtatttgcaagggtcaagaagatgtcggcgaagctgatactggataccgcaggcctcggacttgtagccgggcagatgattggacgatggggcaacttttttaaccgggaagcatttggcgaatatacgaacagttttctggctatgcggctcccggtagatgcagtcagaggctcagacattactgaactgatgcgcaagaacatggagacggtaaaaggtgtatcctatatccaggtacaccccacttttctctatgagtcgttatggtgcctgatggttttgattatcatgctgatatacagaaagcataagaagtttaacggcgaggtattcctggtctatctgcttggatatggcttgggacgattctggatcgagggactcaggacagaccagttgctgatcccgaagatcgggcttccggtatcccagatactggcaggagtgctggtggtagtatcgctggcgcttattatctataaacgaattgaattgaaaaaagtagagaaggaataaaaggatatcatagatatcccctgcaaagaatgcgaaggcaatgtgccttaggactctttgcaggggatattttcatataggaatatgctatcgtttcaatattgccagaatgataaagagggcgcctcctataaaggacagatcctttgggcatcgactgctgatcttacgcccgaggaacaggccgagataggtgaaggcctctcccatggagaatgtggcagccaccgtcagaggaacggagatcttgaggaatgcggccatcgtgcctgctatgagactgtcaatggacatggcaagggaaaagaagatggcctccttccaggacaggcagtgactctggtcggcatctgcctccataggatcgctgtaaatattaatgatgaaacgtaactgtgaaaacgtaaaatgtatatcttttcggacttccttatggtgcctgagatactgccggatgctggagtccgccagtttcaggcacccaaggaagaggaggctgaaaaaacagatctcacgggtgaatgtctccgggatgatccggtcaaggagattgccgaacagcagggatatgcccaggcataggctgcatatcccattgaccgcaaggatctgcttccaggaaagccgaacctggttggcgccatatgcggcgctggcaacaaaagtgtccagacaaagggcagaaacgagaaggaaaatatgaagaaacataataacatgcctttttccctattatattcaaaaaaagtcgttccgacataacccgggatatattttgcggaagaaaatcatatatttgcagagaagattcttgttcataagacggaaagtgggcaaaatatgacggtggggtactatattctgattttcttgtttgggctggtgctcctggtatgggggagcagcctgtttgtagacagcgctgtgtctgtggccggacggctgcatcttcctgaggtgctgatcggggctacgattgtaagcctgggaacgacgcttccggaagtgttgttttcaaccatggcatctgtgcggcaccttccggaaatggcaattggcaatgcactgggctccattctgtgcaataccggatttattgcaggaatgatgctggttttgcggccgatttatctgaatggcaaggcagtggcaaacgtcgtatccgggacagtgttcctgggcttgtcatttgcggtgtatgtagcgggcgctgtcatggagcagggactatccagggcgacgggtggcatgcttctgctcgtctgtattctgtttcttgcttataatgtacgcaatgcttatagccggcagcaggaggagaaggagatgcatgcccaggaacaggcctttggaatcagcgatattatccggcttgcgctggaagcggtagtgatctatatcggcgccagcatgctggtggaagtagggccgaagcttgccagggcttttggcgtcccggaaatgatcatttctcttatattcgtggccttaggaacctctctgccggaactggtcacatcccttatggctcttagaaagaagcatgcatccctgtctatgggaaacatcataggagcggatattctgaattttgtgatggtgggggggctgtcggcggtcatctgcccgatcccgtttcaagagagtattttgaaattagaactgccggttatctttttcatgctgtttatactgtgcattccatccattaccaggaagaaggctggcaggctgcaggggctccttctgctgggaagttatatcctgtatctggcagttctggcggcataaggtggttttttcttggaaagaagtaaccatgatttgtgcaatattactaaaaagataaggtaaaaatatagctacgcaactaaggtagttggaaaaggatgaaagaactttcagaaggattcaagttgcttgaaaataaaaacaatgctgttatactaaagtcagaaaagacaaggaaggtgcacaaaaatgaatgagagagtgagtaatctacaggggaaattaattgtatcctgtcaggcgctgccgcacgaacccctacattcttcttttatcatgggaagaatggctgttgcggccaaagaaggcggagcggcaggcatccgtgccaatacaaaggaagatattaaggagatacagtcacaggtcgatcttccggtcataggcatcgtaaagcgtgattacgaagggagcaaagtatatatcacgccaaccatgaaggagattgatgagctgatggaagtagggccggagatcatcgcagtggacgcgacgtctgaccttcgcccgggtaatataacgatcgaccagttcttcggacagatcaaagagaaatatcctgaccaacttcttatggctgactgctctaccatcgaagaggcaattcatgcagatgagcttgggtttgactttatcggaacgacaatggtagggtacacagaacaaagcaagggcgatcggatagaggaaaatgattttgaaatattgcgcaaaatcgtatccaatgtaaagaataaggtcattgcagaaggcaatatcaatacgccgcagaaggccaggcgcgtaatcgagttgggggcattcagcgttgttgtaggctccatcatcacaaggccgcagttgattaccaagtcatttgccgaggaattagagaaataagaacattataacattacataaaaataaaaaatgaaaaggagaagagaattatgagagacttagacaagtacaaaggtgtcattcctgcattctatgcatgctatgacaaagaaggaaacatcagccccaaaggtgtgcaggcacttaccagatattttgtggaaaaaggggtaaaaggaatctatgtaaacggatcttccggagagtgcatctaccagagcgtggaggacaagaagattgtccttgagaatgtgatgaaggcggcagaaggaaaactgacggtcatcgctcatgttgcatgcaataacactaaggatagccaggaactggcgcgccatgcggaaagccttggagtcgacgcgattgcggcaatccctccgatctacttccatctgccggaatatgccattgcgcagtactggaatgatattagttctgccgcaccgaatacagattttgtaatctataatattccgcagcttgcaggtgtcgcgcttaccatgggcctgtttgaggaaatgagaaagaacccaagagtgatcggcgttaagaattcctctatgccggtgcaggatatccagatgttcaagcaggcggcgggagaagactatattatcttcaacggtccggacgagcagtttatgagcggccgcgtgatcggagcagaaggagcgatcggaggtacttacggggcgatgccagagctgttccttaaactggacgagcatgtgaagaatggagagattgaaaaggcaagagaacttcagcatgcgatcaatgcgatcatctataagatgtgctctgcccatggaaatatgtatggggtgattaaggaaattcttaagaagaatgagaatctggaacttggcggggtcaggaagccgctgccctcattgatagacagcgacatgccgatcgtagaagaggcggccagaatgatctgcgaagcgaaagataaatatctggcataatataagccagcccggacacgaatgagagagttttaggaggaaaagacatgcaaggctttacagtaattgatttggttattttgatcgtatatctggcggcagtcctgttcgccggccttcacttcgcgaagaaggagatgaaggggaaggagtatttcaagagtgacggcaccgtgccgtggtgggtaacgtccgtatctatctttgcaaccctgcttagtccgatatctttcctgtcgcttgcgggaaactcctatgcaggaacatggatcatgtggttcgcccagctgggcatgctgctggcaattccgcttaccatcaagttcttcctgccaatctacagcaagctggatattgatacggcgtatcactatctggaattaagattcggaagcaaaggacttcgcgtactaggcgctgttatgtttatcatctaccaggtgggacgtatgtctatcatcatgtacctgccgtgcatggtattgggaagcctgactggcatcagcgtgaatctgctgattatcattatgggagtcatcgcaatcatttattcctacacaggcggattaaagtccgtactttggacagatttcatccagggatctgtattgctgatcggcgttacatttgcgctggtattccttctttcacatattgacggaggaattggagccatcttcacagcatttactgcagaacacaaattcctggcagttgaccagcccatctttgatatcaatatattaaaagacagcgttttcattatgattgtgggcgcaggatttaatacgatgggctcttatgtatccagccaggacatcgtacagcgttttacaacaacgacagatacaaagaaactgaataagatgatgctgacaaacggagcgttatctatctttattgctactgtattctacctgatcggtacaggactgtatgtattctaccagcagaacgcactgccgccggcagcagcgcaggatcagatctttgcatcctacatcgcgtttgaacttccggtaggcatcacgggacttttgctggcggccatctacgcagcatcccagtctacgctgtcaacaggccttaattctgtggcagccagttggaccttggatattcaggcaaggcttagcaagaaagagttaagttttgagaagcagaccaaaattggacagtatgtttccctgattgtcggaatcttctctatcgtggtagccatggttctggcaaacggcggggttaagtccgcatacgaatggttcaacggatttatgggactggtacttggaatcctgataggaacatttatcctgggggcatttacaaaggtagcgaatacttttggggcaacccttgcatttattgctgcatcagcggtcatggttggtatcaagtacttcgctccggcaggctccgtatccatctggtcctactccctgatctccatcgcggtatccttagtcgtaggcattccggcgagcctgatctggagaaaggtaaagaacgatacatccgtaccggctccgaatactacggttttcaaaaaataagccaagggagaatagaaaatgatatttggaaatgttgggaatttaaaagaattcccgtatctggaaagacaggtacaagagtgctttgcgtattttaagagccacaatatggcagactatgaaaagggaagccatgagattgacggagaccggctgtttgtaaacgttgtggaatatacaacgacgacgccggaggagagattctgggaagcccataagaattatctggatgtccatgtgatgatccggggcacagagcagattgatgtgaacttcatacagaatatggagcagaaagaatttgtggaaaaggatgattttcttccgctggaaggagaaaagaatggccatgtaatattaagagatggcgatttcctggtctgctatccaagcgacggacaccggactgcaattgcggttaacggcccggaggggataaagaaggcaatttttaaagtaaagatataatctgcggcgaggcaaaccagagagactctctggatttgcctttttgcagtatagacgaggtgacaggatatggacttagtgcttttaattggacaaagtaatgcaaaaggatgcgggaatccggaagagagcgaggctgcctgcagacatgcatgggaatacctggagaactttaccggccaggccctcattcctatggggaggacgcttcagctgtctgagggaagaggaaccatcgccccggcatttgctaaccgttattatgacattatgggcgaagacgtatgcgtcattcattacgcggtggatggcagcaggattaagaattgggtccatgacaagaatcattttcttgacgcagccatggaaaagttccggcatgcagaagcatatgtgggaatgagggcgccgatcgggcggagattcgccatatggatacagggagaaagcgatggaaagtacgggacagaccccatctattatttagaacgcctgaaagaaatcggatggatactgaaaaaggaatgcaagatagaagagaccttcgtaagccggacaggaagatggcttccggatgaagagaacctggcccggtgccgccgcattggggcggcccaggagcaggcatgcatggaatacgacaatctgattcttgtgagcaagatggcatccgcattttatgaaaaaggactgctgcaggacgaggtacattactgcatgaaggcgctgaatatgcttggcagcgagattgcagaaaatataggaatatactataatgagaaaagaaggcccgtgcttgaagagacagatgatatggagcgggccagagaggttctgaatatacttaaaaaagcagaggtatcgttatgaagaaatatgtaagcattgacattgggggaacagagatcaagtatggactcatcgatgaggaggggcagattctgacccggtctaagatgaagacggaggcctacaaaggagggccatccatactggaaaaagcggtaagaatcgtggaggcataccaggcgtctgaagaaatcagcggaatatgtatttcaacggcaggtatggtagatactgaaaaaggagagatcttctatgcggcgccgctgattccccaatatgcggggacagaatttaaggatacgatgattcagaagttcagcctgccgtgcgaggttgaaaatgatgtgaactgcgcagggcttgcggaatatatgtctggcgcgtcaaaaggcacgaaggcctcgcttatgctgaccgtgggtacaggaatcggcggatgcatcatcatagacgggaaagtctaccatggctacagcagcagcgcctgcgagattgggtacatgctcatggacggcagcgattttcagacgcttggcgcagcaagcatcctgtcaaagaaggtggctgcatggaagaatgagcccgaagaacagtgggatggataccggatattcgaggcggcaaaaaagggcgatgaacaatgctgccgtgcgattgatgagatggcggacgtgctgggcaaagggattgcgaatatctgctatgtgctgaacccggaagtggtggtactgggcggaggaattatggctcaggaggagtacctggcaaagaagattcgcggcgcggtggacaagtatctggtggcaagcattgcgtcccgcacgagaatcgcatttgccaggcataggaatgacgcgggtatgctcggagcattctatcattttaaaagtcttcatgccaggtaaaggggataacgaatggaatactatgtaaaatccgtagtaccgattatagaatctaattatgacaattttacgaccgtggaaaagaatattgccgactacttcatccagaactacaagaagatggacttttcggcaaaggctgtggcagaaagactgttcgtgtctgaggcatctttatccagatttgccaagaaatgcggataccgaggctaccgggagttcgtatatcagtatgaggagacctttgtagagaagcaagagacgatcaccggaaataccaggatggtcctgaatgcttaccaggaactgctgaataagacatacagcctggtggatgaagcgcagattgcaaggatcacgaagtatctgaatgaggcggaaagagtcttcgtatgcggaaagggaagttccggcctgacagcaagcgagatggagatccgctttatgagaatcggcgtggatatcgattcgcttcaggacagcgacctgatccggatgcaggcggtattccaggataagaaaagcatggtgttcggcatcagcatcagcggtgagaaagaagaagtgctgtatctgctgcgggaagcaaaaaaaagaggcgcaaggacggtgctgattacagcgaagaataaggatatcttcggcgaattctgcagcgaggtcgtactattgccctcgcttaagcacttaaaccatggaaatctgatctcgccccagtttccgatcctggtgatgctggatattatatattcctattacgtggagcaggataagtatgagaaagaagtccttcatgacaatacattgcgggcactcgaggaaggcaggacaaagcgccgggatatgtttgaatagacaacaggaggtagaaatatgattataaaaaatgtaaaagtatttacagaagacaagacatttatagatggacagatcgccatccaggacggcgtgtttgcagcaggctggcaggaaacggatgaagtgattgacggggaaggatgctatgcgattccaggactgatcgacatccatttccacggatgcaaaggatatgatttctgcgatgggacaaaagaggccattgaagagattgccagatacgaggcttctatcggcgtaaccgccattgcaccggcaaccatgactcttacggtggaggaactggaacgaatcttgtctgtcgccgcatcttataacaaagagaacagagaaggcgcggatctggtaggcatcaacatggaggggccttttatcagcaaggttaagaaaggcgcacaggatgagaggcatataattcagtgcaatgaagagatctgccagagatttttggatgcctccgaaggcctggtcaaatttgttggaatcgcgccggaagataatgccgatgctgtcagatttataaaacagatgaaagacaaggtgcgcatttccctggcgcataccaatgcagattatgatacggcgatggcagcctttgatgctggagcgagccatgcagtccatctgtataatgctatgccagcgtttacacatagggcgccgggagtcgtaggcgccgtgtcagacagcggccatgtgatggcggaactgatctgcgatggcgtgcacattcatccatcggtggttcgggcaacctttaagatgatgggagaagatcgaatgattctcatcagcgacagcatgcgggcgaccggaatgccagatgggcagtatacgctgggcggcctggatgtaaacgtggtaggcaaccgggcaactttggtatctgatggagccctggcaggctcggctaccaatctgctggactgcatgaggacggcagttaagaagatgggattgcctctggagacggcagtcgcatgtgccaccatgaatccggccagaagcctgggagagtatgacaagtatggctctatcgctcctggtaaaaagggaaacgtagtgctgcttgatcaggaactgaatctgaaagccgtaattaaggatggaaagaggatatcatagcaattttggatacaatcatagcagagaaaataacctgctccagaggttaaagtagataaggagaagcgtgaagatgattgcaagaggagaaggggcctgcctggtatgcggcaagccgatcgtatattatgaaaaggcgcgggaaatggagtgcataatgtgccataaaaggtttgaaagtcatgccagctgtgaggatgggcattacatatgcgatgcctgccatgccaagaagggaatccaggtgattatggaaggatgcgccaagagcacatccagaaatcccatagccattatgcaggaattgatgatgaacccctatatatacatgcatgggccggagcatcacgtgatggtgggagcagcccttcttacggcataccgtaacagcgggggaaagatcgagctggatgcggcgcttcaggagatgaaggccaggggaagcgagtatcccggcggagcctgcggcctgtggggatgctgcggagcagcggtaagcacggggatgttcatgagtattattacaaaggcaacgccgcttacgggacgatcatggaaactgtcaaatcttatgacttccagggcgcttaagtctattgcggaacttggaggcccaagatgctgcaagagggattcctttacctctgccatagccgcggtagaactggtaaaagaggaattgggagtagagatggaacttccggaaaagattacctgcgatttttcaaatgaaaatgagcagtgcctgaagaagcactgcccgtatcatagattatcatgttagcccattaggaagtcaaagatatcccatccttcggaattggcacgcttgtaaagctcagtgtagccgcagcgggtgcatgagatggtcacgaacttcttgttctggacatcgaataccttggcaaaattgcctcctgtagcctgaaactggtcgctttcatagtggttgtttccgcacttgggacatacgtattgttgtttttccataatcgtttctccttttattaatatacggttgagccaaaaggcatcagggccagtttggccagtttaaactgctgcagaccaaaggggatgccgatgatcgtggcacacagaatcgccccgatgacagctgattccacagccagccagaagccggagacgatcagccagattatgtttagcaggaacgagcctgcgcctccgccataggttacctctttcccaaaggggaagaagcttaaggcggcgaatttaaaacactgcatccccactggaatgccaacgatggtgatgcaccacagcaggcccgcaaatgcccagctaaggccgcttaagcatccgccgaagataaaccataaaatatttcccagacatcccatatagaactcctcctttcttgcattctgtgataaaagacagctgctcttgccgtggcagaagcaacttatgattcagataataaaaaaagaccattatcatgacttccgccacgataaaagtcttgcacatctcatttgatacggatacctctcggtatcgggtgacgctttcaaatacacatgtaagtgttaggctactcccttttatctgcataagaaaaatatactacgaacgaatcaaaatgtcaataggggtacaggaaagatgaagaaaatattgtttttaggagacagcattaccttacccgggagggcgcgaagatagtagcggggaaatggatggaatgctggaggaaacgaaggcatgacaattaagatataatgcgggagcgtgcctggcatattcttgaaaattgtgtcggctgcgtcttgacaaagaaggacaaataagttagtatttcagacaagcgagtatatattgtaaaaggctgtgaaaagaagaagtagtaatcgttacacccatacagaaagctgccggcagatgagaggcgcatgaaggaagggattatgaatacatcttggagccgcgtaccgaaagcgttcccttacagaaagacgcagggaaggatcagtaggctgcgacgcaaggcatacgttacatgcataagctgcggcacgcgtaagttagggcacatataatttgttgcgcgcaggcttaataagactggtgatgcgagttgccggtgaacaaaggtggtaccacggaactatccgtccttatctagtaattgactattagatagggacgttttttgtatttgaaccaacaataataagaagatttcagagagaaaaggagagaagaaacatggggatttatgaagaattgcaggccagaggcttaatcgcccaggtgacggatgaagatgagatcaaagaactggtaaacacaggaaaggcgactttctacattgggttcgatcccactgcggacagcctgcatgtaggacattttatggcgctgtgtctgatgaagcgtctgcaggaggcgggaaataagccgatcgcattgatcggaggaggtaccggctacattggagatccatccgggagatcggatatgcgttccatgatgacgccggaaaccatccagcacaactgcgactgctttaagaagcagatgagccggttcatcgacttttccgaaggaaaagctctgatggtcaataatgccgactggctgctggacttaaactatattgatctgttaagagagatcggcccgcatttctctgttaaccgcatgctcacggcagagtgctataagcagagaatggagaagggtttgagcttccttgaattcaattacatgattatgcaaagttacgacttctacatgctgttccagaaatacggctgtaacctgcagtttggcggcgacgaccagtggagcaacatgctgggtggaaccgagttgatccgccgcaagctcggaaagaatgcctgcgcgatgacgattacgctgcttttgaattccgaagggaagaagatgggcaagacccagagcggagccgtgtggctggatccgaacaagacctctccgtttgagttctaccagtactggaggaacgtggcagatgcggacgtcctgaaatgtatccgtatgctgacattccttccattagaagagatagacaagatggattcctgggagggcgcccagttaaatgcggcaaaggaaattcttgccttcgaacttacgaaactggttcatggagaggaagaagcccagaagtcgcaggaagcggcaagaaccttgtttagccaaggggcggcagcagacatgcctaccactgaactgaacgaagaagacctgacagatggcaatattgacattctgtccatgctggtaaagagcggcctggttccgtcaaaatccgaagcgcgccgtgccgtacagcagggaggcgtagccgtggatggcgagaaagtggaagacatccttgccacgtttgcaggagaagacatggcaggagagggaattgtcctaaagaaggggaagaagaacttccggaagatcgtgatgaagtaagcatttgcgatgtttggatcgcatagagataccgtccatgttccctaggtgacatgggcggtatgagtttagaaacatatggaatagaagggagggagaaaagcgggaaaataggaataaaattcatagcatgcaatggaaacgctatcgatggaaatattgaaacaggtattagaattaagaagcgtttgcaaaatagaaaaagcggatgcataatgaagataaaagaaaagaccagaataataggaggagattgctatggcatttcaggagatatcaattgacagtctggaattcaacccgtttcataaaatatcaaaggaatggatgctcgtgactgccggagatgagaaaaagagtaatacaatgacagccagctggggcgggcttggtattatgtggggtaagaatattgctaccgtatatatccgcccgcagcgctatacaaaggaatttgtagatgcaaatgatctgtttaccgtatcattcttaccggatgatcagagaaaagcattgaatgtatgcggctccatatcaggaagagaagtagaggataaatgggagatggctggccttcatcctttttatgttgatggggccacagccgtccgggaggccgatctggtattggtgtgcaagaagcaataccaccaggaaatgaagccggaattctttgatgtacctgagaacgatacgaaatggtatccggacaaggattatcatgttatgtatatggcggagatcgtaaaagtattgaaaagggaaagatgaggtaagttttgggaaaaggaatcgcaaggctgatgcacatgggttgagagtccatatggcatcagcctttgtttgattgattttttggatatttcatgatagagtatttataaaaatatgaacagacattttcttatgtctatagcgctcctaatgagcacatcggaactcttaccgcagtatctgcggaaatagcggctcaggagatcgccgtaaaattgatggataagtatggcctatcccaggaggatgcgctaaggatgattcgagattgtaaatagcaagttgtaaataacggataatgaaaaattgccgggcagtcctgcccggcatattctttcttaaagtacaagaaagatgcttaggcatatttgaaattttgtaatgtttttttatgaacttgatagaaaatacgatactgcagacgaagtaattaatagatgcaaaatctatcgcttgcctgcgcgggagaaaagacatgaagataacagagactaattttatagaacaattaaaagagcataatgaaaaggcgctctcttacatgatacaacagtatggaggcctgctttcttccgtggtcaacagacatctgcgcctgttgaaagagtatcgggaagagtgcctgaatgacgtatttttaggcatttggaagaatattggatactacgatgagaaaaagagtagttttgccaattgggctgccggcattgccagatataaagcggttgactatctcagaaagtattataagaatgccagttatgagaatatcgacgatctggacattccacaaaatgataaaggattggaagagatcgtggagcgtgaaatatccgatgaattggaacagatgctaggctgtctgggagaacaggacaaggagatattcctgaagttatacatggaagaaaaggatatggagcaggtgagccaggagacagggctatcaaaaaatgtaatctataacaggatatccagaggcaggaggaagatacagaaagaatatcccggagagaaggaggcataaaaatgaagaatatatatgaattgatgaatgagatcaagacggatacagaaaattatccgcaagaagtgttatctgaattcgaggcgaaaaaatggaacaagaaattgtcgaaggaactgaagcggccaagaaggaaaaagtatgcatccatcgcagcatgcgtagttatctgtatggcactgctggcggcagggccgttcagggaacaggtaaaagcggccatgaattcaaccatagattccttgaacgaatggctggctatggatattacagatagggatgtttcgccttatacgaacgtaatcaatacaagcgtaaaagatgacaaaattgatgtgaaggttgaagccgtggtcgtagatgatcgggaacttctgatatctacaattcaggatttctctaagagaaaagacataaaaaaacatatgaagcagctggatggcgatgtggaacggctgggagtatggggactggaatttgactcctttgatgagataagaaaagaattaaaagaaagaccggaggaggatccgatttataacgagattccgtttcttggtactatagtcactctcgatggggagcagataaaaggaacgcagataattaagccaaaggattatgaaaaggggaagatgcgcgtcatatacaggtatgatattgacagaaaagaagcatttgacctgtcaaaagaactggagatgaagattgaattccaggatgtgaatcgtatcagcgatggaaaatgggaatttgcatttaaggctgatggcagagaactggcggccaatacgatgacggtggatctggaccagaaggtagcgctgcccgatggcagcgagatccggctgacttcttacaaaaggaatgaactgggaacctatatttactatgaaggcaagacgccgaagaattatttgacacagttcagaggaaccaatgacagagaagaaacggtgtggtttattgattatggaaatggaaggttccagctggatctatggaatgagatgaggacacaggatattgagagcctgactttatccgtatatagtgcagagataacttcgaaaggccagagcgtcaaagaaagcagttacaagccatacggagagccattcacgatttccgtaaagtaggcagaagaaatatcgatagaaaaagagaactgcgcctgaatatcaagcgcagctcccgatcaagacagacagttattcaaatttgatatactgtacgctataaggcggcagatcgatctggccatttagccttacctccaattgggccacaagttccttggcattgccgttcagattctgatggcaggctgtataaggagtatctgccgcattgatagcaacgatgatccgctccgtatcagagcagcgttcaaataccagctggtggttctgtatgatgatattcttatatgagccattgcagagggcatcgctgttctggcggatgcggatcaattgcttgatatactcggtaagctcattcggcataggggtttcgaagcaggggcgcagggcatagtcattgtccggcgccttttccccgggctgcccccattcgctgccgtaatagaggcatgggatgcctggcatcccaaacagcaggccataggcgagtgggatatgcttatcgttggtcagtatgctggcaagccgggttacatcatggttatctacgaaagttaccaaatgcttgccccggtaaatgcaccagggatcagggccaaactgccggtgcagggaatgggcgatctcaaaaagattcatagagttaaaactggaataaatccccttgtaacactcatagtttgtgcagctgtgaagcatccgttcatttacgatcagattatagtctccaaataatacttcgccgatcaatacgaacccatcctttaattcctccacataggagcgcagtctttgcataaagccatggtccagactataggccacgtccaggcgcagcccgtcgatgtcaaacgtatccacccagtatttgacacattccaggagatagtctgcgacgaccggattctgaaggttcagttttaccaattcaaaatgtccttcccagccttcataccagaacccatcattataattgctgttgccgtcaaaattgatatggaaccagtctttatacggggaatcccacttcttttcctgtacgtccttaaatgcccagaatccgcggcctacatggttgaatacgccgtccaggacgatttttactccatgtgcgtgtaagtctttgcatacactggcaaaatcatcatttgtgccaagtcggcagtcgattttcttaaaatcccgggtatcatacccgtggctgtcggattcaaagattggattcagcaagatcgagtccacgcccagttcctgaagatatcctgaccagtctagcagcttgcggatgcggggaacgcattccccgtcattctgcgtaggcgctccgcagaatcctattggatatatttgataaaatacgctgttataagcccacatagtataaacctctctttcctctaacgaaaatatatgacggaggcaggatatgccgccagttcatattatatcaaaaagaaaaggaatatactatacccgcaggcatttcgtttaacagcgcttttaagggcagtatataatgaaggcagatgtttccggggcattaggatagggaaagagaaatacatgcttggcggaaggagcggattatggaggaaaagatgatagagacaatggattatggaagcctggtggatctattcgtaaaatctggcctggagattcatccggacgatccggcgccggatgggatggtaacttgcttcaggctggaagatgagatcacgggggaactctatggagcagcaggactttgcttcgatgcaaaagaatatatcctaagatgcgtggctgtggaagaggcgcaaagaggaaagggatccgaaggaatggtgtatgattatgtgaaaagataaaatgaaccgggttaagatttccggttcatttcacgtttcaaaaagaataaaaaccatatgagaaggagcacgcctttaaatatgctggtgctggtgatgctccaccagattccgttgagtcctaaagccgtttgtgtgaggaccagtgccagaggaatccttgacgcggtgaatatgatgcttacgatagaaggcggaaccgtcttcccatatccggagaaggcccctgcggtcgtaatctccacgctcatgaataactgggaaatgcccagtatgatcaggtagtcaatacccagcgggattacatctgcttcccggataaagattcggaagatcggctccggacataggatcagcagaaaggtgcagaggactccccagatgaggacgattcccatggcggaggagtagcccttcttaatacgggtccggtttccggcaccgtggttctgtgcaataaatgagtttacagcggcggcaaatccatccgacgtcatccaggaaatggactctatctgagagcctaccttctgtactgctaccgcagcatctccatagcctgctacaagccgggcaataatcatggagattgccgtaaaaatcatactctgtatggaggttggaacgccgatctttataatagaagccatcgcctttgaatccggctttttacggacgtctaccttatgaaaaatcaggtcatccttggctgcgtagtacaagaacatcagcgttacgataaactgtgcgatcacggttgctacagccgctccaagtacttgcatgcgagggaacgggccgatgccaaagataagcatcgggtccaggacgatgttgaccgcaagtccggcagtcgtggcaagaaatgcggcccggctgttcccaatggcggtaaaaaggccggtgaaggtctggtttaaaaatgaaaaaatgacaaacccgcaggtaacttgaagataaacctgggcatctgcgattacttttggactgttcagccgaaagaaaccaatgaagggcgttgagaatatagtacaggcagcgccatacaagattccgaataggatggccaggtgaagggcattcgaggcatatcttgatgcgtcttccctgtgtcctgctcccagggcatgccctacattgacctgcccgcccatcttggataaggcagccagcccgttggacagccacatatacatgcctgcggcgcccacggcagcaactgcgttgcttccaatctgcccgatccagatcatatccgtcagattataggccatctggatcagcgaggttgccataataggaatggccagcctggttagtgacggcaggacaggcccatttaataaatctacatttttctgcataataatatcccccgagaaaacacttgaaaatgaaagcgaagatattataacatatgaaatagaggaaagacaggaagattctgacaaaaaccacagaaaaattccagaaaaatggttgacacgcgtggcaccgtataatataataagacagtatgacaaaaggagaaacagcacgaagccaaagccccggagtcttgctgatttcgatataattatcatgaaaatgttaatgattcacaggaggtaaaccaatgaagacttatatggctaatccagataagattgaaagaaaatggtatgtagttgacgctacgggatatacattaggacgcttggcatcagaagtagctaaggttttaagaggtaagaataagccggaatttactccgcatgtcgacacgggcgattatgtagtagtagtaaatgctgagaagattaaagtaacaggcaagaagatgaatcagaagatttattacaatcactctgactacgttggcggaatgagagagactacgttgtctgagatgatggataagaagcctgagaaagtaatcgagcttgctgtaaagggaatgcttccaaaaggacctttgggaagagcaatgattaagaaacttcacgtatatgctggaccagagcatgagcagcaggctcagaagccagtagaactgaaattttaaggagaggttgaaaggaggacattacagtggctaaagcaagattttacggaacaggaagaagaaagaaatctatcgcaagagtatatttggtaccaggaacaggtaacatcacaataaataagagaaatatcgatgaatatttcggacttgagactttaaaggttgttgttcgccagccgttggttgcaacagagacgaatgataagttcgatgtgatcgttaacgttaagggcggcggatacacaggacaggctggagcaatccgtcacggaatctcaagagcgcttcttgaggcagacgcagactacaggccagtgcttaagaaagcaggattcctgactcgtgacccacgtatgaaagagcgtaagaaatacggcctcaaagctgcacgtcgtgcaccacagtttagcaaacgttaatttcggttcagcaagagataattgaagaaaatatgaagatacagataaacctcagagacatcacgtttctggggtttatcttttgccccttgaaacgtgctgaaccggcagaaaacagggtggaaattcgtcaattcaatattttcaaaccgaaaaacccggaatttaagtccaggaagttcacagaaaaaatgaaatactattatacggatattatctataagctggtaaaaggtacgagccagagaatttaggagggctggaaaccggatcggttccgaagaattctgcagaaagcgatcggaaaactgagaggattcattcggtttgtgaaagagatccggaacggagaatttgacgcaagaggaaacccgctgatccgcccagatctgagatttgatgtgacaccggcaccactgccggagacggcaaaaggagaaagaccatcttcagctctgcaggaagcgaaagtgatgagactggatcatattttgcagaagaagaaagcgcagcagactctaagcgagattcctaaaatgcaggaatatgaaaatgcactggaagtgaaaaaagcctataaagctgcagttactgaactgaaagatgtgcggaaacttcagagtgaatgggaacagaaaggaatcccggaaaagaagtactgggtgatcaaagccaacgttccagagaagacaaggcagaaaagcatccatgaacgtctggaggaggtatgtatattcagattataatatttcgtaataacgaaatattttgccataaagaaaggattgatcagaaaatgtttgacggccagtgtgtatatggagattggattgcaggcagggatattgctgatgcaggatgtggtcaggaacgtttgcatggggaatatgccagatactgaaaaagagcatatataaggaatttcagggatgctttaaactaagagaagaactaacattttaaagcagttttcactttaatgttatagatagtgatagtataataagtctatagatccatagttgttgaacgtaaaatgggaattgactgaatagagaagaaaagggatatggaactggaacttattagattagaggaattacatatcagcgaattgacaaaaataatggagcgcgcttttgatgaagatacaagaatacatctttgtgaggataaagatggacctgacgggtatgatgtggtagttttttgagaaagtggggactaaatcgaaatgcttcctcatatggcatttttttggaaggaaagttaattggaggtgtgattctttggattgattgaaaaaatgtatcctgatataaagatttggaatacagagacacctattttttcgagcagaaatcataatttctatgtcaataagtgtggttttcatattgtcaaaattgataatcctaaaaacaggcgagagggtcaatatatcttgcagaaagtgaaacctgacggaaaaaggcatagaacaggccagacaatttgctgaaatcgtccagatgatattgacatgattataacatctccgttaaaaagggccgttgaaacaggtaaaattgttgctgcgaaaatgaatgttcctttgtatagagaagtgctgctaattgagcagaattatggaatatatgaaggtgttgacagaaaggaaccgcaatttctaaataacaaaagaaatttcgcatacagatatcccggcggggagtctatgatgcaggtagcatatcggatttataagtttattgataagatcaaagaagagtatccggaaaagacgatacttctgatcagtcacggtggtgtatgccgcattatcaggacatattttacggacatgaccaatgaggaattctttcattacacattggaaaatgcaaaatgtgaggaatatgagttgtaggatttttctaatactcattttgaagggggaagagtgatttgttagaagtgaaattttatgacacagtagacgatgcattattgaagtttgcggtaattatttcaaagagcaacgggaaatgggtattctgcaagcataaggagcgggatacttttgaagtgcctggaggacatcgtgaatttggtgaaaatatcatagagactgcaaagcgtgaacttcagtaagaaaccggcgcagtccggtatgatattaagccggttttcgtttattcagtcacgggaaagaaccgtgtaaatgaaagcggagaagaaacatttgggttattatgttatgcggaaatcatgggattttcagatcagctgaacagtgaaatggaaaaggtagtgcttatgaatcagctgcctgaaaactggacatatccattaatacagcccagattgagtgaaaagtatcttcaaatggaaaagcaatcttacagttaattatggaggcaggatatggttataccacaaaatggaaactgctgctttaaaaggatagatggaagaaatggaaaagtaaagatcttttaatatacatggatttcaggagaaagaacaatatggacttaacatacaaaaaagcaactctgggagatattgatctgttaacagaaacaaggataataatattgaaagcagccaatcaattatctgatgaggttgatatgagcgaagtgaaaaaggagtcttatcattattatcaaaaggctctgcatgatggccgccatgttgcctatttggtctttgatggaaaacggtttgttggagccggtggtgtcagttattttcaagtaatgccgacttatcataatccgagcgggaaaaaagcatatataatgaatatgtatacagaccctgaatatagaagacgaggaattgcgtttaaaacattggatattctggtcaaagatattaagaataaggggattactgctatttcattagaagctaccgaaatgggacgcccactatatgaaaaatacgggtttgtagcaatgaataatgaaatggaattattggtggaataaattgcaaatatccggattgaaaggaaaagagatattatgatacgtgaactcaaagaatgcgagtattctattttgtctgattttctgtatgaaacgcggatatgaaaaagtttctctgtctgtgcagaaagcgaactatgccgtaaagctgtatgagaagacaggctttaaaattgtggatgaaaacgaagaagaatacattatggtacgtgattggtgagagacaaatgaagataagagagattacagaaaacaaaaagcaatatatttcccttttgctgctggcggatgaacaggaaagtatgatcgacctttatcttgatcggggtactatgtatatcctggaagatgacgggataaagtgtgaatgtgtggttacggatgaaggttgcggaattcttgagattaaaaatattgccacggaccctggctgtcagagaagaggatatgggaaggctatgcttgagtttgttacagaaaagtacaaaggccgatatgacattctgcaggttgggacgggtgacagtccactgacaattcctttttatgaaaattgtggttttgtctattcccacaggattaaagatttctttacgcaacattatgaccatccgatttatgaaaatggtgtccggttaacggatatgatatatctgagaaaacgattataaagtaatattgctgtaatttgaataatttgcatgatgacggtatcgtgtttagctaaattccttgtaaataaatagataattgcgtacggataaatgctgattggaggaggtgtcatataaatggacagtaaaaaggtgaaagaactattgttttcattaggtgcagacttgtgtggaattgcagatttaagttatttttctaatgcaccaaaaggatatcacccgttagatgttatgccgacatgtaaatcggtaatttcatttggttgcagatttcctgtcggaacacttatatgcaaatcgccgattccttatacaagagtacgaaattctattgtacctaaagtagatgccatagcacttgatttttgtattgaaatggaaaaatcagaaattgtgtgtgttccgataccggcgaatgaaagtcaatgggacaagaataccggcagataccgttcaatcatatcattaaaacatgcggcgcaggcagccggcctgggaacaataggacggcattcgcttctgatcacgccggaatttggcagcatgatctggctgggggctgttttatgtgatgcagggcttgaaccggataaaacattagaacatgtttgtgataactgtaaccggtgtgttgatatttgtccggtaaatgcactgcagatgccggaattagaccagcagaaatgttggaaccatgcttttggagatgatgaagaaattcagtcatggagaatcatttgtcacaagtgcagggacatatgcccatataatttgggaacaaagaactctttttaaaaaagataaactgctaattatcgtattgaataaatttgaatgggggagttgctatgaaacgtgagttaggaattgcccgatgtggacttgcctgttgtttgtgttcaaggataatcaattgtatattgcaatgaatggaaagggggctatcgcactcattacttagagcgactggtcctcatttttgcaaaactgtaaactgatattatggaaaggttgacaataaaaaggttattgtttatagtaactaagaagattacaaaggaggaaatataatatgactttagtagaagaattaaaagagagggttatgagtaatggaaatctgtcaagagaagaagcctgtgctcttttccgggaaccattagaagaacttagccgtgctgcggacgagatcaggaggcatttctgcaaagacgggtttgatatctgtacgattgtcaatggaaaaagcggcaggtgttctgagaactgcaagttttgcgcgcaatcctccttttatcatacagaggcagtagaatatccccttatggatgtcaaagagattctggataaggctatcgataatgccagacgcggggtactgcgctattctatcgtgacatcaggaaggcgccttggcgataatgaaattgatcagatgtgcaggactatccgtaaaattaaggaaacagtggatatcgagatctgcgtttcttttgggcttcttgacaaggaacagtttataagactgcgggatgcaggcgtatcccgggtacataacaatctggagacatccaggaggtatttcccgcgtgtttgcacgacccacacctttgatgataaagtggcagccatccgcgccgcccaggatgcggggctgaatgtgtgcagcggtggcattatgggacttggcgagacggaagaagaccgaattgatatggcgtttaccctgaaagagttgggaattaaaagcgtgccaatcaacatgctgaacccgattccgggaacgccatatgaaaacgtcccaaggcttaaggaagaagaaatgaaaagaatcgtcgccatataccgctttatccttccgtcggcttccataaggctggcaggaggaagagggctgcttgcagacaaaggcgaaggatgctttcggtcaggagccaatgcagtcatatcgggggatatgctgaccacctcagggtataccattgagtcggatctggagatgattggaagattagggtacaggacggctctctgtaacgggtaaggcctttttccatttttccataggcttatagcacaatctgtgataaaatagaaagtatataattgctgcacaagaatgtgacggattgcggcaaggaagaaaggatgatgaggatgggggaatttgtaatcagttgctgttcaacagcagaccttacagaagagcattttattacgcgtaaaatatcatacatctgtttccattatgaactggatgggaaagaatatgccgatgatctgggaaaatcacttccttttgacaagttttatcaggcgatgatgaatggcgcccagactaagacttcacaagtgaacgctgaagagtttacggaatattttgaaggattcctcaaagagggaaaagatatcctgcatgtatgcctgtcatcaggaatctcaggcgtgatcaattccgccgtgattgcaaagggagacctaaaggagcagtatccggacaggaagatctatatagtagattccttgggagcgtctgcgggatatggacttttgatggatcaactggcagacctgcgtgatgaggggaaaagtattgaagaagtctatcaatgggctatggataacagacgaaagttacatcactggtttttctctacagacttgaccttctacatcagaggggggcggatctccaagacagcaggctttatcggaggagcgttgaatatctgtccgctgcttgatatggacaaggaaggacatctggttccaagatttaagatacgtacgaagcggaaggtaatcaaggctatagtagacaagatggaagaatatgcacagggcggccttgaatattcgggcaaatgctatatctcccactcctattgctatgaagatgccaaggaagtggcccggcttattgaagagcggtttccaaaactgaatggaaaagttgagattaataatgtaggcacgaccataggaagtcatacgggcccaggaaccgttgcgctgtttttctgggggagcgacagaaactaggagggtcaggcttgattctcctgaaagggattccttaccacttaccgctggattccataccacttgctgaaatattgtttactttccatcccagttatggttagataacaccagggagagggaaagatgaagatacgcatagaaatcgaagacaacttaacagaggaagagattattatacgcagcggcagcctgaatgctaaggttcagatgatacagaaggctattgccgaggcggtggacaaagagcagaagatgtcattctttaaaggggacacggaatattatctgcagcttgccgagattctgttttttgagacagaagatggagaggtatatgctcatacgaggaaagagacctaccaggctaagtaccgcctgtatgaactggaagaggctcttcccagatattttatgagagtgtccaaatcgacgatattgaatacgaagagaatctatgcgatcacaagaacgctgccctcatcctgcacggtagaattccagggtacgcacaagcaagcgtatgtatccaggtattactataagccgcttagggatagattggaagaaaagaggtaaggatatgaagaaggaacggatattttggggattattttttatagtcgcggcaatttttctgcttgtaagccggctggggtttctgggggacattggcgtatggagtttgctgcttacggtattcttcgtggcatgcctggtaaaaagcattgcccataggagcgtcagcggcgtgctgttcgcggtggcattcttatgcattatctatgcaaagcctctggggattgaggcgattacgccgtggccggtgcttggggcggctgccttaggaagtataggaatcagtttcttataccatcccagaagggattacaggaactatggatgctggggccgcggcaatcactattcaacggagacagaagagactgtggatggaagccagatggagtttagtacttcattcgcaggcagtatcaaatatgttaattccgatgatttccagagtgcggatttaaaatgttcgtttggctcgctgaaggtgtattttgacaatgctatgattcagaatggcgcggcgaggatattcctggatgtttcatttggcggggtcgaattgtttgttcccaaggaatggaacgtggtgaataatgtaagcgcatcttttggatctgtggacgagaagaattctagcaggagttcaggggtacctgtagtgacgctgacgggaaaggtaagctttggaggcatagaaatagtatatatttaaggagcaatcaatagcagctatgcttttgaaattaagaggactcggttgcaagaggcaaggaaaaaggatttccttgcttcttttttggatgaaataagattccgatatacattgctataaaatgttcttgacattctaaactgtacatgataaagttacagtaataaatgtaatattcaaatatacagttcgaaaagaggtatggaaatgaaaaagtatcaggatatcatcattggttttggaaaaggcggaaagacgcttgcaattattaatgtaggattgtgaaaagacggaaaaaaggaattttcaagaggatttcgaatattgctgtactttgctatagcaaatacgggatttgcaggacttagtgcaatatattatataccttgggcgctgagaaatcatggatgggagatggatgggatgacatatttttgctggaactgcatgttctatgtgattatgctgttctgctttattattttagtgaaaattgccgtttccaagagaccattttctggcgcgctggtaacgcttttttacggagtaggcctgctgtttattactggatccgcgatatttcctagtttgccggggtatacgcagccgcatatgctctcgggggttgaaggaggattttatatcgatatgattccgtttatggcgggcctggtattagtcctcttcggaagaattctgcggtatggattcgagtatcaaaaagagatggattctattctgtagaaagtgggggctgtgacatggcaattatactaaggcttgaccgggtgatggcggaccgcaagatgtcactgaatgaattatcaaaggaagtgggaatatccaatgtaaatctttcaaatctaaagacaggaaaggtaaaagcaattcggttttctactttggagtctatctgcgatgtgctggactgccagccgggagacatattggagtatcgacgggaaacttaaaaattaggtgtaagaatgtgctttggcacattctttttttaataatatattaaactaataataaaaattggttgaacgatgcattaataaaattaagatttatattaaaataattaattatatgattgacatttttaaggatatggattatattagtcttattagaagggaagtggatgtatgagaaaagtaatcagccagtgtcctgtgtgtggaggagaactgaaagtaacccgtttaaaatgcgaggaatgcgaaacggtgattgagaatgactttgtgctgagcaagttcgactacttgtctggagaggaactttattttacagagacatttatccggtgcaggggcaatatcaaggaagttgagaaagaactaaagatatcttaccctactgttcgggcgaaactggatgccataatcaagaaactgggatatgaagatgagacaaggcaggacgaagagatgatgaagcgcgaggctgtgcttaaggcgcttgaacaaggggagattacggtggaagaagcaatcaggcaattgaaataagaaatgaaaataatcaatgaaataggagaagaattatggatgagagactcagaatattaaaaatggtggaagatgggacaattacggcagagcaggcagccgagcttatgaaggcaatgggcgtggaagaagaaagccaggttccagcgaaatccaaagccggctatgataagaagatgttccgaatcatcgtagacagtgtggatggcgataaagtaaatgtccagtttccggtgggcgctatcaagaagatccttaaagtgacaggcaagcttcccattgcggataaagatctgcagggagtggatctggagcagatgatggatgccatctcggaatgcctggatgaagagatcgaaggcgattttgtcaatgtcgatgcagcggacggtactactgtaagagtatatgtagggatataaaggagctgtctatgagagtaatcgtaagatccaaagatgcgaatttcagaatgcctgtgccaatcgggcttgcttctgttgttgtaaagttgattcccaaggctgtatttgataagatgggcgaagatgtgcctaagccatatgacagccttgtctcaaaggatatcatttgcatgatctttgaagaatgcatggatgtgctgaaagagaacaaaggcttggaaatcatacatgtagaagcagtagatggaacattcgtttctataactctataaaagcgtcggataaaaaatcagaattccttaataaaattccattctttattttaagaatccttggctataattttcttagataaaggagggttgaggatgctgaatgtatttacgctttatagtctggcaagcatgctccttccctgcatggtctatcagttaatcttggtagtcaaggcgcgcaggaacgggcagaggtgccaggctgtacatgtcatctggatatatattttcctgatatatatatggatggtattccaggtgacggggatcgggcttctgggggatatattaagaacggacactgatctcattcttgggggagtgaattttgttccttttgattccattgggattggctatatcttaaacgttgttatgtgcatgcctttgggatttttgcttccattaatctgggaagattgtaggaaattggggaaaacggtgatgataggagccggattctcattgctgattgagattacccagctctttaattatcgcgctacagatattgacgatctgacagccaacacgcttggagttttattgggatatttcatatggaagatatttgtgcggctgttcggtatccgactgaaagcaagagccataggaaagcaagaggcaatcatctatatattgctgtcggtggcaggcacttttttactgtatgatccttatttgttattttagatactaatatttgtctaaagaaactatcttctgacatttaatggcagaagatagtttcttttttgcttcttaattaaatgtttctttcactctgcatggtattcatcttcccaaagacctgggggcttgatggagtatggacagcgccggcgttacccagtgttgtctggcactggcaggactcatcctgctaaaaatgctggacaaacgaatgcttgggaaggtaaaatgagcacgtaacaaagttgaaaagtgttacgtgtaaaattgaaaaatgttacgtgtcaaacctacacaactggtgcgtaaaattgatcgggaggaggatatcgcatgggagagcagttaacgcgaagtgacgtcaagaagataaaggaagagattgaataccggaagctggtggtccgcaagagggaactggaagcggtaaaagaggctcgggcacagggagacttaagcgagaactttgaatacaaggcagcgaagcaggataaaaaccgcaacgaaagcaggatacgctatctggagcggatgctcaagaacgccagaatcatctcggatgattccggggaagatgaagtagggattaataatacggtagaagtatatttcgaggacgatgatgagacagagacctaccgtcttgtcaccagcgtgcgcggcaattccctacagggcctgatcagcatagaatccccgctggggaaggccatcaaaggtcgaaaggcgggagaccgcgtaaaggttaagaccaatggcgacaatggatattacgtggtggtcaagaagatagagaagactacggatgattccaatgataccctaagaaaatattaattggagaagggtgccaaggaagacccaaaacgcgattcacccggaaatgctgtacacctccggcacaatcctgtgcgtggaaatttataggcagttattcagttaactggtagagatgcacagccaattatgagcatacataaattatcgtctaaaaaatatttagttgtataataaattggtttgatctagttgattaaccatacaacaaattgcggaaggtaaaattgtggaaaaaggttgcaaagaaactggaaagtagtataattaacgttgtataaaacagaacaacggggagcttgcagatatggagcaggctgagagtaggctgatattgccttgacccataaacctgatttggataatgccaacgtagggacataacgtatgtaatcagacggatatgccgaaggcggcatatccgtttttcatgcgcaaaaggaggaaataggaaatgctgggaaagtgtttagacaatgtaagaaagacgatgccgctggtacataatattaccaattatgtgacggtcaatgatgtcgcaaatgtgctgcttgcctgcgggggaagcccgatcatgtccgatgagccggaggatgttcagatattactgccatctgcggcggattgaatattaatatcggcacattgaatgaaaatcctaatcccccagctatgctggggagaatggagtaagcagaagcgtgtatgatatcaataaaaaacctcctatgatacaatgagaatggtatcgcaagccaaactcaaacataggaggtggtccttatggacaataaaagtttatcacacacaagatggaaatgccagtaccatgtagtttttatacctaagtatcgcaagaaagtgttatatgggaaattgaaagttgatgtacgagaaatacttagcatcttatgccgctataaaaatgtggaaatagtagcaggagcagtatgcgatgatcatgtacatttaagtgtagcgattccacctaaaatcagtatatcagatttcatgggatatttgaaaggaaaaagtacattaatgctatatgataggcatcccgaattacaaagtaagtgggataaggcattttgggcaagagggtattacgtagaaacaattggtaatattacagacgaagcagtacagaagtatattaaagagcaagcagaggattcaagaaaagaagattcaagaggtgccgctttatagcggaccagtaaaagtgcttgcgataccgcccttcggggcgagcagtaacaatagccctttggagggctaaggctaaaccaccacttgaagtggtggttgtaactaaaagaacgatagaaggcatgttcgtggctggccataaggccaatgaattgggccatgtggtgcttcttgaccctgtaggggcaggcgccagcgcgcttcgcaccaatacggctgtaaaactgatggaggaacttcatctggacgtcatccgaggcaatatctcggaaatcaagacgctggctcttggaagcggcaccaccaaaggcgtggatgccgatgtggcggatgcagtgacagaggaaaatctggacgaagccgttgtgtttgccaaggagtttgcgaagacatccggatccatcgcggcaattacgggagccatcgatctggtcagcgacggacaggagtgttatgtgatccgcaatggccgtccggagatggggaagattaccggcaccggctgccagctctcggggctgatgactgcttttctagtggccaatcccgaccagaagttaaaggctgcggctgccgcggtctgcgcaatgggacttgcaggagagatcggatggaacttaatgcaggaaggagatggcaattccgcgtaccggaaccggatcatcgacgcgatataccatatggatatggagactttggataaaggagcaaaatatgaagtgcgataagaaagacctattattatacgctgtgacggacaggcattggctgaacggcaggacgctatacagccaggtggaggaagcgctaaaaggaggcgccaccttcatccagttaagggagaaggaactggatgaggagcattttctggaagaagccaaagaaatcaaagaactgtgcagacgctatcaggttccattcgtcatcaatgacaatgtggagatcgccctggcagtagatgcggatggcgtgcatgttgggcagagtgatatggaggccggggatgtgcgggcaaagctgggtccggacaagataatcggcgtctccgcccagacggtagagcaggcggtgatggcagagcaaaatggagccgattatctgggagttggcgcggtgttcccgaccggctcgaaagcagatgctctggaagttagccacgatacgctgaaagccatctgcaaggcggtaaagataccagtcattgctatcggcgggatcagcaaggagaatattctggaactttccggcagcgggatctgcggcattgccgttatcagcgcgatttttgcaaaggatgatatagaagaagcggccagggaattaagaggcctgacagagaagatggtaaccgcatgataagaggcgcgatatttgacgtagacgggacgcttcttgattccatggcaatctgggaagatgcgggagccaggtatctgaaagggcttggcatccaggcccaggaagatttggggaaactattatttcccatgagtcttcaggaaggggctgcctacatgaaggccaggtatgacctgaaacttagcgtaagccagattatcgaaggagtaggggatacggtaagagactactacttttatgaggcccctctaaagaagggggcagccgactttttggggaaattgtcaagaaaagatattcccatggcggtggcaacatccagcgaactggagcatattgaagcggcatttaaaagactgaatgtgaatcaatattttcagaagatttttacctgctcccaggtaggcgcaggcaagagcagaccggatatctactttgcggccggcaggtatctggggacagagccccgggagacctatgtgttcgaagatgtgcttcatgccatcgagacggcggacaatgccggtttcaagacggtaggcatatacgatagattcagcgaatcgaagcaggaggagatccgaaagcactcggatatttatcttgaggatttgaccgattttcagacattttgggaatatgcatccaggtgatgcttagaccggcggtagattgggggcaccaccttctgtcgcttgataaaattaatgcaggattttatgaggaggatatatacagatgagaacagcattaacaattgctgggagcgattccagcggaggcgccggcatccaggcagatatcaagacgatgatcgcaaatggcgtatacgccatgagcgcgatcacagctttgactgcgcagaatactaccggcgtgacaggcattatggaggtgactccagaatttttagcagaacagttagatgatatttttacggatatctacccggacgcggttaagatcggaatggtatcggcaagccctctgatccgcatcatcgcggaaaagttaaaagcatacaaggcagacaagattgtcgtggatccggtcatggttgccaccagcggttccaggctgatcagtgacgaggcgattgagacgttgaaagaatgcctgcttccgatggcaagcgtgctgacgcccaatataccggaggcagaagtgctgtccggcctggcaattgagacgcagaaagacatggtggctgcggcgggagccatcagcaggacctattcctgcgcggtccttctaaaaggaggccatcagatcaatgatgccaatgaccttctgtaccgggaagattcttataaatggttcaatggcaggcgcatagataacccgaatactcacggcacaggctgcacgctttcaagcgccatcgcctcgaatctggcgaaaggatttgaccttgacacctctgtagaacgtgccaaggcgtatatatccggcgcgctgggcgcgatgcttgacctgggacgaggaagcggcccgatggatcacggatttgccctgacgggagagtttatccgggagaaggaagagagaattgctcctgattcaaacaaaggggaggcgtgctaggaaatggaagaaaagcgtacctctatatttgaaaatggactgatctggtttggcgcaggggtatcaattgcggagattcttacgggtacctatcttgcgccgctgggatttaaaagaggactggcggctatcgtccttggccatatcattggatgtgtcatgctgtttctggcgggcgtgatcggaggcaaggccagacgaagcgccatggagaccgtgaagatgagcttcggccagaaaggaagccttctgttctctgttctgaatgtattgcagctggtgggctggacggccatcatgatctacgatggagcgctggcggcgaacggcgtggtccgtaccggcagatgggtatggtgcctcgtcatcggcattctgatcattctctggatcatgattgggatcaccaatcttgggaaagtcaatgcctttgccatgacagcgctctttattctgacgctgattctgtgcaaggtgatcttctttgacagtggtgccataggcatggccgccgatgacagcatgaccttcggagcggcagtggaactgtctgttgccatgcccctatcctggcttccgctaatcggcgattacaccagggaggccagggagcctgtaaaggcgacggcggcaagcgctatcgtatatgggcttgtcagctgttggatgtacgtgattggaatgggggccgcgatctatacgggagagtatgatattgcccagattatgctgaaggcgggacttggcattgcaggccttctgatcatcgtgttctccacggtcaccacaacctttctggatgcatattccgccggaatatccagcgaatctatcatcgccaggtggaacggaaagcatgtggctgtcattgtgacggtgatcggaacgattgcggctatcgtgtatccgatggacaatatcacggacttcctgtatttgataggctctgtgttcgcgccgatgatcgccatccagatcgcggacttcttccttttgaaaagggacagcagcaaagatcgggccaatatccccaacctgctggtatggtctgtgggatttgctatatacaggattctgatgcacatagatatgccggtaggcaatacacttccggatatggtaatcaccattcttctgtgcctgatcgtaagcaggattctgaagcagaaaaaatagttcctaatgaaaaatagtagaaaataggcggttgcaaccaatagttgacaaatagttggtagattgcaaccgcctattctgttatgcttgttacatggaggtgagcaggatgtcgctaggaaaaaatatcgcatccaggagaaagagccagaatttttcacaggaagacattgcgactctggtgggcgtaagccggcaggcggtctccaagtgggagaaggatctgtcaagccccagcacggagaatatcatacgtctggcggagattcttcgggtatccgttgaagaactgacaggtggccgcccggcggcagcaggcagagacagagaagacaggagcgtgtaccgtgtgtcagacagtagatatctgtggcttctgatcaaagaccggttattcatcaggctggccaacccggtgctgatattcttgtatctggaagcatggcagaccatgtaccagttagcctatatcggaatgctgaaaaggaatcttttatggctgtccatctattcattcggaatattgctgtttatcctggaaggggcagccgctgtctatattgcggcaagacgccgggtgatccttggcggggagttcctggaactgtcggaagagggtatcgtcgtggtggacatgtcctaccgcaagaaggctgacatccactggcgggaagtaaagcgggtaaaggaaagcaggcattattatttccttatcctggaagggcggcgttttctgccaattcccaggcaggatatgacagaggcccaggagagtctgctgaaaaagcatgcaaggcgcgtccggggcataaagctgcgcatcgtgattgcagcattctggatattcgtaacagcatgcggcacctttgccgtaggaaggtgcatggtgaatctcaatggaaagctggcctggaagattcaggaggcaaagacagacaaaaaggtaaggcttaaggaaaagaacttctacaaaaccgggctttcaggaattatggatagggtgcaaacgaaagtagaactgatgcctcaccttatgaccgagaatgtggatattatatttaagaaggatggagagattgaaagcatctatgccttcatctatggatacgatatggactataagctcaggactacgtatctggtatcctacgagccgcagacagacaagcggatgctgatacacactcaagactggacgggagtcgataagagcgagcagaaagaatacgatccggacaatgatatggagatactctttcaaatggcggagaatattaatgtccaggatgtagtaaggcagtgggatgaagagcgttacggattctattacaaaggaattgcatcctggggatatctgggagcggcggatggtatccgctatatcgaccagaaaggaaaggttacgctgcctgacgattattcaagcgtggaagtgaatgggccaagcctctccatctactgcccagataagaaggaagaacggacgcccatccgatttgtctatgcaccgtcggaaaccatgtaatacgtgccaatcaggaacagaggatacgactaggaagaaggagagcgagtagaatgagcaagtacagaaaaatggcaggagtcatagccttatgcgtctgtgccgcggtgctgtgcactggatgcaggtatcaattttttgagcagattccggtaattggaaaactgtttaaagatgggcaggatgtgaagccgggctacacggattcaggacagtatgacctgccggcagccctcaaaaaggcaaagcgtcccgagtcttttaacgaaaatgttattaacgaaataaaaaaattgacgcctttggaggagtcggatgtcattgtgacagaagaccgctatgagagcaaagatgtgcagtctatggagattccgaagaacccatacgaggttctggctgcggatccggatgactatgcagccgctgctgctaccatgctggagcggtattttgcctcctatctctatgaagatacagaaactattgacgagccgaatattccaaaggagaagtattactcttatatcgaggtgcaatggtccaggccgctggccggaagcagggaggaatttgctgttgctgccgcagtcaagatccacgatgtaaacccggaggataccatatatacggaatttggggaaatcggcaatgacaatgccatacactgcaaccttacggtatatggcgaacaggctaaggattatacctttaatctaaaaggcatcgcacagacggaggacgtattaaacgctattgaagaaaagttccagcctgtccgggcagaggcgactcctgtttcgccggatcggtataagatagagggagagactctgtccatttcctatgacaacggaggtacctggaaaagcgttcctattacgatggatcagttgttcggggaagatactcagacagatcggatctctcttttaagcggcagttattatattgcgccggataagaccttcttcgtctacggaggacgggagaaaatgccggtcaccatgatcgtgtcggaggatgccggagagacatggaccaacaaggaagtgctggatcaccccggcgttagacgtagttatgcagggatgagcggggatggcagttttatctatgcgctgatgtgcgtggataagaccatggggtccgaagcgaccgtactttctgtcagcacggacatgggaaacacatggacagccaaaaagccgatcgatgattttatgacgttcctagtaaatggctttaccttctttgacagcatgaatggaatggcggcggtcacagaccatgaaatgctggactttaagaggacaaaagacggagggaatacctgggaggaagtacgtatggatcctccggcagaggggtggaccatggtttatgccccgcagaaagaaaatgatacatggatattctacgtagggcaggatggatacgaagaaatggcgggcgtattatacaagtatatcagcacggatatgggagagacttgggagaatacgggaagggtaatattgtagaataagaatcgatgcttgcctttctggaatttctatgctatcctatccaaagaaaaccaagatgaaatggagatgagaggatgaggacagcttcttgctaatggaaacgtaactgcatagcaggatgtacatggggattgcatgcccattcgttttgctgtgcacgaatagcaggaaagttgaacaaatccatctgctgggcaggcaattcattcgtctttaaatagagaatattttgcgtacgttattacgtagtgaccgactttgcgcatccatgcgacaagatgctaaaagaacgtgctgccaagactgcagggaaggctttcctgcagtcttttttggataagttttaatagttgaatgggggcatgcattatggcattgatagatgtagtagatttaagcttcgcctatgagggcagttatgataacatatttgaacatgtgtcgtttcagatagacacggactggaaattaggatttgttgggcgtaacgggcgcgggaagacgacatttttaaatctgcttttgggaaactacgaatatcagggaagaatatcttccaatatggaatttgcgtattttccatatgaagcaaaggataaaaggcgtatgacgatcgagattttagaagagatctgtcccggctttgaacaatggcggatttaccgggaactgaatctgctggaggtggcagcagaggtcttattccgcccttttgaaacgctaagccacggcgaacggacaaaagttatgctggccgtgttatttgcaggcgaggatcgattccttctgatcgatgagccgaccaaccatctggatatggaagcaagggataaggtggcccggtatttgaacagcaagaaaggatttatcctggtatcccatgaccgcaggttcctggatgcctgcgtggatcatatcctttccatcaacaagatggatattgaggtgcagaagggaacttttagttcctggtatgccaataaagaggcaaaagaccagcaggagatggaacaaaatgaaaaattgaaaaaagaagtccgtcggttgagccaggctgccagacgctccggggaatggtctgacaaagtggagaaaagtaaaaagggccagcgggtagcaggcctcaggcctgatagggggcatatcggacatcaggccgcgaagatgatgaagcgctccaaggttttggaaggccgtaggcagcaggcggttgaggagaagtcccggctgcttaagaatattgataccgcggaagaactcagactctatcccctggaatatcatacggaccggctggcagaacttaagaatgtgtcaatctcttacgatggacgaaaagtatgcgaaggcgtgaacttcgaagtaagacgcggagaaaggatctgtctgagaggaagaaatggatgtggaaaatccagcatcctgaagatgattctgggagaaaagattccatacacgggagaaatgcaggtcggaacgggaataaagatatcttatgttcctcaggatgcttcattcttgcagggaagcttggaagatatggcgttggaatatgatctggaggaaagcctgtttaaggcaatgctgaggaagctggatctggaaaggagccagtttgataaggacatcgggcaatacagcgccgggcagaagaagaaggtgctgctcgcaagaagcctttgccagagagcccacctgtatatctgggatgagcctcttaactacattgacgttctctccagaatacagatcgagcagctgctgatggcatataagcctgctatgatcttcgtggagcacgatgcggcattctgcgagaaggtggctacgaagcaagtgcggattggcaatcttgggggcgaataatttttaggacattttgctcaaacatggattgcgaacgtaagttcggcgtggtatgatacatgtatatggaattagcagctcatactattagcaagtgcgggaggaattaagatggaacagatgtccttgtttgacgaccggcaggccagcgcgccgctggcaagccgattaaggccctcttctttggaagacttcgtgggccaggagcaccttcttgggaagggaaggatgttaagacagctgatcgagcgagaccagatatcttccatgatattctgggggccgcccggcgtaggaaagacgacgcttgccagtatcatagccggacgcacgaaggcggattttatcaatttcagcgcagtcaccagcggaatcaaggagatcaaggaggtcatgaggcaggcggaggaaagccgctgcatggggattcgaaccgtactattcgtcgatgagattcaccggttcaataaggcccagcaggatgccttccttccatttgtggaaaaagggagcatcgtcctgatcggcgccactacagagaatccctcctttgaagtgaatgcggcgcttctttccaggtgccgggtattcgtgctgaaggctttggaagagatggatttggtaaaattattgaccaatgccctgaatagcccggccggcctaaaagaccagaatgtccggattacgcagcagcagcttaaggccattgcggcgtttgccaacggggatgccagaacggcgctgaatattctggagatggcggtgataaacggcgagatcacggcagatggcatgacggtcaccaatgaaggactggagcagtgcatcagcaagaagtcccttttatatgataaaaatggtgaagaacattataacttgatatcggcgcttcacaagtccatgcgtaacagcgacccggatgcagccatctactggatgtgccgcatgctggagggaggggagaatcccctgtatatcgcgaggaggctgattcgttttgcaagcgaggatattggaatggcggacagccatgctcttcaggtggcggttgcggcctatcaggcgtgtcattttctgggaatgccggagtgcgatgtgcacctgacccatgcagtcacctatctgtccgtggctcctaagtccaatgccctttatatggcatgcgaggcatgcaagaaggatgtgaagaatctgcgtgcccagccggttcccctacagattcgcaatgcgcctaccagcctgatgaaggaactggactatgggaaaggctatgaatatgcccacgatacagaagagaagctgacgcatatgcagtgcatgcctgagggaatggaagacaggaaatactaccggcccaccacgcagggagaagaagaaagggtaaaggaacggctggaagcaatcgaggcatggcgcagaagttaacatagcgggaaagtccccggctaaaaagactaggatgaagaaggatggaaagaagatgaaagaggaaaaaagcgcatttgagagaatctacgatattatccgggagattcccgaaggaaaggtggcttcctatggacaggtcgcagaacttgcgggaaaccgccggtgggcacgggtggtaggctatgcccttcatgctgtgccagaagacagcgagcttccctgccaccgggtggtaactaaggatggtaatgtatcctgcgcctttagcggcggcatctgcaaccggcagatggaattgctgaaaaaagaaggggtaggatttatagacgatcatgtggatatgcgacgctttcaatggtcgaagcgcctattctgatgtttgggctcgcaaggcaggctctgaccgatccatctttctaaagattaagattatttgaatatcgtcctgcatagggaatttatagagaatatcatgctataatatttcccgaaaggcagggcgatatttttatggaaataaagaaaaagatgctggcagcggatgatgagccgggaatcatccatctgttaaaggattattttgaaatgcaggactaccaggtgatagaggccgaaaatgggatggaagtactggagaagatatccctgaacccggatattattcttctggatgtgaatatgccaggattggatggatttgaagtatgcgagagaatccgcgcgcatgtctcctgccccatcctttttttgacggcaaagatagaagaggctgacaggatcaagggcctgatgctgggaggcgatgactatatattgaaacccttcagtatcgaagaactgggagccagggtggaagcccatctgcgaagggaagaacgaattaagcgcaaaaagccggtgaagatctgtggagcgctggcaatacgctatgaagaacgctgcgtatatatcggggaagatttgcttgggcttaccaagacagaatatggaatcctggaacttctgtctctcaatccaggacaggtattcagcaaagagcagctctatgaaaaggtccgggggtatgaaggggatgcagatgcaggcatcataacagagcatatccgaagaatcagggcaaagatcagccgttacacagataaggcatatattgagacggtatggggagtgggatatcgatggattggataaatgagaaatttgaaaaactgttttcctgggtgaggaatcttactttccgcagggcaatgatcgcttatatcctattgacatccgttatcgtatgggcattatcttttgttacaatgcgactgtgctggcagtgggagaacagtctgtggaaacaatatgacagtatcaatgacttaggcaatgtcatagttgaaaatggcttgatgtggatgaattcgatgtggaggcagcaggtagatggcaggctgatagtattggatatgatccgggtgtggtgtccgttcttctatttcctggcaggaatcattgtggcgatctgccttttttaccgaaggcggcttcggacgccgcttgcaattctggaagactccgcggctgccatcagaggaaatgatctggactttcggatcgcctatgacagcagggatgagatgggcaggctgtgccagtcctttgaagagatgcgccaggaactggtatgcaataaggaaaacatgtggaaactggtggagcggcagaaagagttgaatgcggcgtttgcccatgatcttcgaacgccgctaacggtattaaaaggatatacggattttttggccagatatatcccggagggcaaggtaagccaggaaaagatgcaggataccctggaattgatgtcggatcatattaagaggctggaacgctacagctataccatgaaagaagtcagaggaatcgacgaggtaccgctgcgggctgaggatatggcacttgagggtatacagagcaagataggagaagtggtatttgccttgaaccagatcggggatatctggatcgattatgccagatctgaaacagaatgcgagatatacgcggatgacagcctgatcgtggaagtacttgagaatctgctttccaacgctattcgctatgccaggacaaagatccaggtaatggatgactatgatgcggccagcagcgagttgatcctggcagtcagagatgatgggccgggatttgccaaagaacagatgcgaaaggcgctcaggccttattataaagagtatgaagacgatgcaaaggatgaacacttcggcatagggttacatatctgcaggcagctgtgccgcaagcacggcggaacgctggacattgccaacagcgtggaaggcggtgccatcgccacagcatccttctcctgcaaaaaggaatcaagagaatcttaatatttcgtagggaaaatatagatatttgtattctatgctatagatatccgaatagaaagagaggagaatcagaatggatataagtatcaagatagaaggcctgaatcaatattatggcagaaaacaggcgcttaaggatgtgaatctttatatcaagacgggcatgttcggactgcttggaaggaatggggcaggaaagacgacccttatgaaggtcctggccacgcttcttaagaagtccgagggaaaggtatcaatatgtggcatcccggtggaggatgccagggaaatcagacggatcgtagggtatctgccccaggaattctccatgtatccgaatatgacggtacatgaggcgatggattatctgggcgtgctttccggcatggatcaaaaaagcagaaaacagaagattccaaaacttttatataaggtaaatctacaggaagaccagaagaaaaaagtaaaagcattatcagggggaatgaagagacggctggggatagcccaggctatcctgcatgatcccaagatactgatagtggatgagcctacggcgggactggaccctgaggagcgtgtcaggttccgcaatctgctgtgcgagatagcaaaggatcggattgtgattctgtctacgcatatcgtgggggatattgaggctacctgcgaggacatcgcggtgctggacgagggaagcctgatctaccagggtacggctgcagaattgaccagcctggcagaaggcaaggtatatatggcggaaatcagcaggaaagaaatggaaacattaaaggaaaaatacgtggtgaccagcatgcttaccctgggtaataatgtgatggcgcgttttatatctgaaaccaggccctttgagtcggcgaaactttgcgaagcaggggtggaggacgcctatctgtatctgatgcatgggaagcggggtggacgataatgttctttaaacttttcatgaaagaatgttcccaaacggcaaaaagcctgacttattggctgttggtgatcatcatggtgctgtttttcgcctcccagatgggacagatggatatggagaaggcgccggaaaaaggcttggaggattatggcgtcaagccgagcaaggataataatattattatgagccacacgttgggaatgcttgccagcgagtacgtcgaaggaaattacgccacctatcctatcgggtttattaagacggtgactttgagcaaggaagaagagcagcgggtaggagagattctgaaagagaccaccggactcgataaggaggaaatagaaaagaagatggatgatttctacgggactggcggattcatccaatcaaaccctacgcttcagccggcagaaagcctctcttacgaaaggtttgaagaagtcatgcaagaagtggatgacatgctgggaggcggatcatcctacgctttggattcaatcggagataacggatctgagcctaagacctatgaagatgcggtgaaagagtacgaagaactggtacataaggacggctataccggaggctatgcccgccttttcagcgactacatggtgatcattctgggaattcttccagtattcctggctgttaccagggaactgcgggatcgaagggcgaatatgcaggagttgctctatgtccgaaggtcctcttccatgacgatcatcgcaagcaggtacctgtctatggtcgtcatgatattgattccagtcttagcgttatctatacagcctttggcaggctgcgtcacgtatgcaaaaacagccggaatatcggtggattacctggcatttgcaaagtatatcgcaggatggctgctgcccaccgtcatggtggtgacggcgcttggcatgctcttgacggaactgacggatactgcgcttgcagtgctggtacagggagcctggtggttcgtctccatctttatgggggcgaagacgatggacggaggaaggtatggatggaatctgattcccaggcataatacgattctgaattacagcggataccaggaggggttctctcagctgctgtctaacagaatcttgtatgcatcgcttgcggtcatcgctgtatccgtaacagcctggatctattcgcagaaaaggaaagggaggatgaatattcgtggaaagatatctgcaaatcggaaaagtcaatctaatgcataatgtcctgtggcatttgctggcctgcgccctgcttctgtgcgcctccccgctagtgctgggcaccagcaatctgggagaacgtgataccgcaaaggtactggaaatgttcgtggcgctcattggcatcattatgatcccgtcggtgtttctgccggagcagaaccgggacatccgggaattgatccgttccaagtatacgggctgtggaatcgtgtatggcatccggctaatgacaagcgtgctgattcttgcagcgcttctggggatatacgtctggatccttgccagaggaaattgcagtttcccggttgccggctattattgcggtactctggcggaaatgctgttccttggcggattggggttgttcttttacggactttctgataatcttgtgataggatatatgataccgtttttttactatatcgttgcgataggaagcggagataaatacttgagaatgttctatccattttccatgcagaaaggcagttatgacgagaaatactatctgctggccggcgccgtcatcatgatcggcgcaggagtatgcctgaggtgccggaggcgctagtgctggcgcatggagataacgagatagagcgggacaatataaggataccgaaataaccggcaggaggatgagcagatggaacagaagaccgtgaatctatatacccgtcagaatgataagactttgtatcagttggagcgaaatggcaggattatcaatgaaaggatctatgtagaactgcattttggagatatcgcccccttatttatggaaagctacgactggtttaccagggaggcggctaagaaagtggcaaagcctgaggatgtaaaggccccgatctggtgctcgataagcccggataactgtttaaagccgattccggataccgtggtctatgtgctggaagtgccccaggatcagatcatttactttgatgatgtgaagtgggattatgtactgaaccgtatctatcttccgaaggatgacgaagatgccgccgcttataagcggcacctgaaagagatcggggtagagaatgggtttgaattctttgagggcagatacaagggcatgttcccggaggaagtagagcgcatccgcgccagctggaagcgggtctttgagatcgacaactggaccatattcaacgtctgcggcaatatctgggagattaagaaggaatgggtaaagcgtatcgtgcggcccggggagagcgtggactagtccacgctagatggaacgcaggtttggcgcgtatttcccggtcccatccttctggcggacgtgcagagtacgaggcagcctaagagaagagactgcatttgtaaaagtagtcagctgcgggatggaaaaagcagcggtcataagcaggcaggacaggatcagcagaagagagccgctaagcgtatcgatcccccttagcaggtccgtgcagcctttcagataggagtaggccaggccatggaacagatagatcgccatggtccgggttccgatataggaatagaatgtccggcggccagacatcagcaatgcgaccgccagcgtcatggcaaagccgatgccatagcagattccccggcagatgacgccttcgataatactctgatccagataatcatagttatatcttccatagaagattttgggagaaagattcctagggaaagggtcaaaggccagaaagcatgcaaaggcagcaacgcctgcgcatgcgatcatccggtttttcagagtgcgcattcttacaagcaggcttcggtcaaatgccgaccctgccaggaagtaagggaaaaataccagggtacgcggaatgcttaagaaattgtccggcatatcaaggcatccggccagaagtcctgcgagaatggaaatggccatataatgcggaatctttcggatatgcggagccagcagccgccagaaaaacagcgcctggatataccacagggagaatttggggtatagcaggtacagcccggttggcttatggatgatgaaggtgtaaacaaggtaatagatgatttcatatataatataaggtatggcaagcttctggaacaagatgccaagcgaaagcgcacgttttgaaaaatagccggatatgaagataaaggccggcatatggaaagacactaccagccatttcaaagcgtacaggaactcgttatccttgtaactgagttcgataaagtgtccgattactaccagcgcgatcagaagcgccttataattatcaaatagatagtcccgcttttttgtatttcccgacggcataatttcaactcctatgatcaaattctatttttaacctaatacattctactcctggattcttatcaggacaagaagtaaaatgtataaaaaaattaatgatattttcatgaatttgtaacatttttatattaatggataaaagagggaatttaggtttataatacagatataaggcactcgtagacgaagcggcagatagtcatgctgcagtttcagccatattctggaaggtgatcgtatgggagattttattgtctttattacgccgtttattattgccctgaatggcatcttgctgatcgcgactgaagtgatcgactggaagaataagaaaaagcgacgggaaggcgctggcggggaagcagataataggcaggaagagtatgaagatataaaaagaaaatggagggacgactcctaaaggctaaaaaaacggttccgatcaggaaccgttttttatgcccgattctattccggggtgggaagaatcagaagggataagttggtcagatccgcattgtcctccccggcggagatcagggaattaaaattcaccggcacattcaccgtggtctcttccccgaaagtaggcgccgcagcatatttttccaaggttgctaccaggcctgccgatacctcgtcaatcgaataataagtgccctgctggaactcattcattgcatcaatcaggctgttatttggcacgacagtgacatccatagtgtaattgaagccgccggcatcctttttgggaattcctgtagtgtactggcactgcttcataatgttcttaagggcatccttatatctctgcacataggcctcgcctaagtctgaaggaggatcgaacgtctccgtctcataccaggcaagagcctcttcctcggtgcggttggtatgtttggcaaattgctctacttctcccttaaaactggcatccagataagattgcataaagttctggacgtccaggatttcacagactgcattgtatggctccatgcagtcatacaaagcctgggaaagaaacgctttcaggctgtcgttgcttatagcgaaggaatccccatccttctttacctccaaagtcgagatgacttcggcctggtactttggcttatcggcaagtatttttgcgtctgattcaagaagggcggaagtctccgcagtcagatcggatgatttcaaggcgttggctttctcgctgtcggaagactttaaggtctctcccacattgagcggggtataggtgacgtccactttatagtttccgtcatcgccctttttggcggaggctacttcaaactctatggtcttgaagcattcctgcaggaacttctgatagggctcctttagttcttccgggaattggagtacatactcctgattgcttttggcgattccatcctccagaacggcggcgaagcaatccgccttttccttcttcatagaagtaatctcctcgccgacgtatttatcggcggagtccttgccgcatccggccaggaatagcatggacagcaggaaggcggcggataggatgattttctttttcataacgctaaccctcattcctttcttaaatataaaattataataactgtattaattgtaacatcaagaaacagctgcttcaacaggaggttcaagaagtttcaaataccactggaaaaacccatgtattttatatataataagataacaggtcaaaaccaatgaaaaaaggagatgtattcatggaaatgttatcaattgagaaagaactgcagggaaattcatatccgggacgcgggattatcataggcaggagcactgacgggaccaaggccgtaaccgcttattttattatgggaagaagcgttaacagccgcaaccgaatctttgtggaggatggggaaggcatccgcacgcaggcatatgatccgtctaaactgactgatccaagcctgattatctatgcgccagtgcgtgtgcttggcaataagacaattgtaacaaatggagaccagacggataccatctatgagggaatggacaagcagatgacgtttgaacagtcattaagaagcagggagtttgagccggacggtcccaactatacgccaaggatttcgggaatcatgcatatcgagaatggcacatataactatgcgatgtctatcttaaagagcaataacggcagtccggacagttgtaatcgctatacgttcgcatatgagaacccggcggcaggcgaaggacattttatccatacatacaagtgtgacggcgacccgctgccaagttttgagggtgagccgaaactgatcgcggttccggatgatatagatgcatttacagatacattgtggaacagtttgaatgaagacaataaggtgtctctgttcgtccgctacattgatatcgcttccggtacatgtgcgaccaggattgtaaataagaaccagtaagtcaaaaggcaaggataataaatgcaaaggagcaagagaagatgaaagaattagagttgaaatatggctgcaatccaaatcagaagccatccaggatctatatggcaggcggcggggaacttcccatccaggtattatgcggaaggccgggatatattaacttcttggacgcgtttaatgggtggcagctggtaagcgagcttaagaaggccacgggacttccggcagcaacctccttcaagcatgtatcaccggcgggggcggccgtaggactgccgctgagcgatacgctggcaaagatctactgggtagatgatctgggagaattgtccccgcttgcctgtgcatatgcaagagccaggggagcagaccgcatgtcttcattcggagatttcatctccttatccgatgtgtgcgatgtggacacggccaggctgatcaagcgcgaggtatccgatggcgttattgcgccaggatatgagccggaggctctcgaacttctgaagcagaagaagaatggcaattacaatgtcatccagattgatccggattatgtgccggagccgctggagcacaaggatgtgttcggcatcacgtttgagcagggaagaaatgaactgaggatcgatgaggaattcttctccaatatcgtgacggataacaaggaactgacagagcaggccaagattgatcttgccatctctatgatcacattaaaatacacccagtccaattccgtatgcttcgtaaaagacggacaggcgatcggcatcggcgcaggtcagcagtccagaatccactgcacgcgcctggcaggcaccaaggctgacaactggtggctgagacagtccccgcaggttatgaaccttccatttgtggattccatccgtcgcgctgaccgggacaatgccattgacctttatattggggacgattatatggatgtcctggcagatgatgcatggccggcaatcttcaaagagaagccggaagtattctcaagggaagaaaagagagaatggcttgacaagatgacagatgtagcccttggctcagacgctttcttcccgtttggggacaacatcgagcgcgcccataaaagcggcgtgaagtatattgcacagccaggcggctctgttagagacgacaatgtgatcgcaacctgtaataagtatggaatggtgatgtcctttacgggaatccggctgttccatcattagggatttttgggcgtggtttgttggaacttggaagaaggacggcgtctgcagggggcaggtggcttttcttttccgacttgcttcgccttggatttgtaacttcaaatgcagtcaaaataaggaaaccgtgcctattcggcaggaaatctggatgatttcccgtctcagaggcacttggggattttgcttgtggcaaaatccccattccttattttggctgtattttcagtaacagttcctacggctcatccgacggaaaggtaaagccacctgccccctgcagacgcctggcgttcactaaagttcaagaaactatcgcggcggagaaggtgtacatgaacgccagcacacctcatgacgttgtcggtaaattgccgacagcgagggtggagatggggcggattctgcaggaaagcggacaggacgaagaatccatcccatcccctccctcgcgtacgccaatttcactacaaatctccccaaatgtagtattctttagacgttcgtctttctttgtacattcaattttctgaatatttcccttacaatagattttaaaggaaggtgatgcagatgtccatagcagagattctggttatctccatcggcctatccattgatgtatttgtggcggtggcatatcttggggcgggtttttcgaagatccttgcaaggaatttggccgggcttagccttttatttggcgggatgcagcttggaggcctgattatcggcaatctggtcactttgcttccggcagttccgacagaccactcgaagaatgtggctgatggctgggaaggaataacggtactgatctttgcgggacttggaatctatatgatatgcaagggcgtgaagagggaacaggtcctggaacgccggaaagatgcgatcgaatggaagacgacgacggttctggctctggtgaccagcatagatgcatttatggcaggcgtagggatgggatttttggatacagaggtgattgcccaggcgatcacattatttccggtaacagtcctgcaggttatctttggcgtatatgcagggtacaggcttggcctgaagcacaacaggcatgcatacttgatcgggggcgcaatgcttcttttggccagcgcggacgtagtaatccactattatatatagattgaacgaaagaagaaggaggaagcatattatgagtacattatcacacaaagcggcaagaggcgcgtatggaaccgcgatcgacatggtgctaaggcacatgaataaggacagggaaaaaggaatgcttcaactggtggatctgacagaacgctatatgggcagccattttgacagcaagaattatgaggctgcgaggtgtatgataaaggatcctgagagtaaatggatgaagtatatcaaccgtctgctggacgaggtggatccctatgtcatccgccagtcggccctgaatcttggctatgaagcaggactttatgggaccaagaccatacgggagatgagaaaaaagtatgactgcaatatcccttggctgattctgatggaccccaccagcgcctgcaatctgcattgcaccggatgctgggcagcagaatatggcaacaggctgaatcttacgttcgatgaattggacggaatcattacccagggcaaagaactggggatttatttctatatgtataccggcggagagccactggtacgtaaggccgatattataaaactatgcgagaagcataatgactgtgccttccatgcatttaccaatgggacgctggtagacgaggcgttttgcgaggatatgagaagagtggggaatctttccttgtctatcagtctggaaggctttgaagaagtcaatgattttcgcagagggaacggggtatttgacaaggtaatgcatgccatggatctgctaaagcagtccgggcagatattcgggacatccatctgctatacgagcaagaatattgatacggtgacttcggatgaattcctggatctgattatagaaaaaggctgccggtttacctggtatttccactatatgccggtgggaaacgatgcggcgccggaacttctgccaacgaaggagcagagggagtacatgtaccacaggatacgggaaatccgggcaatggaaggcggtaagccgatctatgccatggatttccagaatgatggtgagtttgtaggcggctgcattgcaggcggacggaactattgtcatatcaatcccaacggcgatgtagaaccgtgtgtattcatccattattccagcgcgaatatcagggaagtctctctgctggatgcgctcaggcagcccttgtttatggcatacagggataatcagccattcaacggcaatcatctgcggccatgcccgatgcttgagaatccggagatcctgatgcgtatggtaaaggagacaggcgcaaagtctacggaccttaagtcgcctgagacggtggagcatctgtgcggcaaatgtcatgagtatgccgagaactggaaggaaaccgccgagaagatatgggaagagaatcctcatcataagatgaattatgaaaattataagcagagccataagtcggcaagctgacctttcttatatcatagggaactccgttccctatgatataagaaccatccgggggatgcgcactccggcgtaagccgaaattgtcgcaggcggccgccggaggcgcgagaatgtgcagagcgcattttttgttctgctaggaaagaaggaatccccttgaagaaaaataactggtggaaaatcatattcattgtaatagtcctcatcatcctctgtctgttatttggagattccttcttttctatacaaaaggaaatatcggatacggcagggcagacaatacttggaatctgcctttgcggcgtattctataacctttcggagggactagtatatgtctggcttgccaggagatatcagaatgattttcattacagggatggcatcgcctgctcttactatactgcgttttaccgtacggttacccttggaagcgggacggcggcagcgacagtatattttttatataagaaagggatccaggtgccggaaggggttgccatctgtgcagtccaatatgtattgcagaggattgcggtggctgtgtttggaggggcaggcttccttttctgtggcctctatatgaaccgttggtttggagaataccgcatggaactgattctgggctatggcctgactgccgtcatctgtctggtcctgatactggcctgcgtatccgaacggttccaccgtacgctggcatggctgggaagaaaagcagacagaaagcacaaatatgaagataagattatgcagatggaaggcaaaggcatgcttctaaggcaggagacggcgaaccttatgaaggacaggagggatataatcctggtactgctgatggaactggtaaaactgggctgctggtacgtgattccgtatacgatcctgcaccctgcgggatcgggaatttttgagacggcctgcgtcacttcgctaatattgatgctggcgggcattattcccgcgcctggcgggcttggcagcacggagggagtgttcatactgctgttttccaggatcgcgggaggcatcgaggcggcttccgccatgctgctctaccggtttgcaacctatatggttccttgtgcgcttggtggcatctgtgttataatattccacaaatactggaaggcaaatggtgacaaagggtgattgaatggaacgtagaagcgaaaagacaaaggctttgctgggcgaggaatttaaagaactggtggtggaaaagtcttttgaaaaaataacaattaagatgattacggatgcggcaggggtcatccggcctactttttataattattttcaagataaatatgaggtcatggaatggctgttatgggaagacgtctttcaaagcgtgacagaacttatttccatggatatggcgctggaagcaatgaagatgctgttccgcaagatgggagcggacaaggcgtattatagaaaagtctttgaagtagagggacagaattcttttgaagagatgctgtatcagaggatctacgacgtggcccggaaactgatagagaagcatcctctgaaagtggaagaggacgcgcccatcattagcgaggagatattcttaagattccagtccatcactttggtaaatgggatcaaatactggctgctgtatgaaacggatgagatatccgcggatacggcgcttaagttttatgaatttctgatgtcccattcgctgttggagattatcgatgacgatatattaggcagggttattaattaggatcataatttctaattaatgccttgtttttttatgtccccaatggtatgatagtcgaagtgtaaaaagccctgaaacattaggagagaagtgatagcatgaatctgtatgacgtaattattataggcgcgggtccctccgggattttctgcgcatatgaattgatgagacaaaaaccggatctgaaggttttaatgattgaaaagggacgttcgatcgagaagagacagtgcccgaagagaaagactaagacttgcgtgggctgccagccctgctctattactacgggatttgccggagccggagcattttcggatggtaaattatccctctccccggacgtgggaggaacgcttcctgagattttgggatatgagagggcagcagaactgatccacgaagcagataacatctatctgaagttcggagcagatcagaaggtctatggaatcgaggattatgaggccattgagaatattcgcgccaaggcaatccgcgcgaacctgaagctgattgaatgtccaatccgccatcttggaaccgaggaaggatataagatctataccaggcttcaggagcatctggaatcctgcggcgttgagatcagattcatgaccatggtcaaggatattatcgtggaagacggcgctgcaacaggagtcgtgacggataagggcgaagaattctatgcgccggagattgtggcgggaatcggaagagagggttcagagtggttctctcatatctgcaaggagcatgagatcgagacgcgcaacggcacggtagatgtaggcgtacgtgtggaagttcgggatgagatcatgaaggaactcaatgagaagctttacgaggcgaagctggtatattatacgccgacgtttgacgataaagtccgcgtgttctgcaccaacccgtcaggggaagtggcaacggagtattacgatgacggcctggcagtggtaaacggccatgcttataaatccaaggatatgaagacaaataataccaactttgcgctgctggtttccaagaattttacggagccgttcaaatcacccattgaatacggcaagcagatcgcgcagcttggaaatatgctgtgcgatggcaagatacttctgcagcgctatggggatttccggcggggcaggcgtactaccgaggaacgactgaaccgcaacaacatcgtgccgacgctgaaagacgctgttccgggagatctgtcgttggtattcccgcaccggatcatggtagccattgatgagatgatccaggcgcttgacaaagtgaccccgggtatcgcttccgatgagacgcttttgtatggcgtggaagtgaagttctattccaataaagtggtcgtgaatcaggattttgagaccagcgtaaaaggtcttcgggcaatgggcgacggcgcttccatcaccagagggcttcagcaggcatccgccaatggcataagtgttgcaagaagcatattagcgaagtagagacaggtaagaatagaaaagggggcataatgcttctgataatgttatggccccttttgacgttatttttttacatttgggttgtatatagagtaaaaaaaatatataatagtaaagatgtaaatgctgatagtgcaaaaaaatcggtaaatatggcaaatgatttgaaggagaagtattgctatgggaaaatattttggaacggacggattccgcggggaagccaatgaggtattgacggttgaacatgcattcaaagtgggaaggtttcttggatggtattatggccaggatcataaggccaaggtcgtgatcggaaaggataccagaagaagcagctacatgttcgagtatgcgctggttgcgggactaacggcatccggggcaaatgcgtatctgctccacgttacgacgacgccaagcgtatcttatgtgacaaggacggagaattttgactgtggaatcatgatttccgccagccacaatcctttctatgataatgggatcaaggtgatcaacggaaaaggacataagttggaggcagaagtagaagaaaagatagaacgttatatagatggcgagatgggcgagctgccgcttgccaagaaggaagagatcggccgtaccgtagactatgcggcaggaagaaaccgttacataggctatctgatctccttggctacccggtcatttgaagataagaaggtgggcctggactgttccaacggaagcgcgtttgccattgcaaagagcgtttatgatgcattgggggcaaagacttttgtgatcaactgcgagcccgacggcaccaatatcaatacgaactgcggctccacccatattgaggtgctcaaggagtatgtaaaggcaaatcatctggatgtgggattcgcatttgatggagacgcagatcgatgcatcgcggtggacgagaacggcaatgtgatagatggcgatttgatcttatatatctgcggcaagtatatgaaggaaaacggacgcctcaacggagataccattgtcactacgatcatgtccaacctggggttatacaaagcctgtgacaaggtaggcttgaaatatgagaagactgccgtgggcgataagtatgtctatgaaaatatggttcagaataacttctctctcggaggggaacagtccggacatatcattttcagcaagcatgcaaccacgggagacggcatcctgacctcccttatgatcatggaagtcatgctggagaagaagttaagtcttgccaagcttgccgaggatgtgaagatctatccgcagctgcttcagaatgtgcgggtggcagataagaagacggcaagggagaatcctaaggtcatgaaagcaatcgacgcagtggcagaggcgctgggagatgacggacgcatcctggtaagggagagcggaaccgagccggtgatccgggtaatggtggaagcggccacggatgaactttgcgccaaatatgtgggccaggtagtcgatgtgatcaaggcacaaggactggtagttcagtaggctatgaaagcataaaaagtgaacaaaagggttccgctctagatggagtggaacccttttcctatgatttcgctggtattggagataagaaggaatgcgtccggcgcattttccttaataaaattcctgagtttgacggcctcgatccgattaagcgctgtaaagatgatatacttatcctcgccggagaatgcgccttgggcaagaacaatggtggcgcttcggtgcaagtcatccttgataaagtcgcagatcgccttgggacttgtgcacactacgttgaaatacttggatagattcaaactttcaataaagccgtcaatcataaaggagcggacggcaagtcccagaaaagaataaagcccggtctcgatatcgaatacgaagcagccggcaagggtaataataaagtcagtgatcaaaagagcctttccaatatcagtgctggtatattttttcatgatcatggcaatgatatccgttcccccgctggatgcgccgatattaaagagtactgcggagccaagggaaggaagcgcgatggcaaaagccagttccatcaccggctgatcggtaagcggctgattcaatggatacagccgttccaatacggataaggtgacagacaaaaggatgctgcagtaggctgtcttttccgcgaatttcttgccaaggatcacgaagccgacggcaagaagcaccatgttggcgataaacgtaaaatcgctggcagagatccggcctgtcttcgctaccaggaccgcaagtcccgtgattccgccaaacgtaaagttgttggcgaatttaaagaagtagatgcctactgccataataatggtactgaaggttaataagaagaaactttttaattttgatttcataattccctcctttgtctgcattgtaaatctgccgtgtagaaatgtcaacgaattcatgctatattggaagaagaataatgtaagcaaggagatggaaaagtagtcctacgtttctccgaaggcgaatctgtatacagagatgttcagcataaaactgctgatgaattcctgacggtcagcaaccttgcaggaatcgcatttgggaatgcgggtacgggcgctgtccatgcaatgtcctatccgctgagcggtgtctgccattgcagcagatggcagaaatatacagaaggctatattagtccattattgcattagaaaaacattaattacacataatatcctccatgaaggaggagataagcgatgtataagtatttaccgattacggatgtatacgcaagagaaatcttagattcccgcgggaatccgactatagaagtggaagtgctggcaggggacgaatacctgggaagggccagtgtgccgtccggcgcgtctaccgggcagtatgaggcagtagaactcagggatagggaagagcggtatggcggccttggagtggaaagggcggtagaccatgtgaatgccaagatcgctccggcagtgatcggcgtgaatgtatttgaacagccggcccttgacgccatcctgctgcagctggatggtacccagaataagtctcatctcggcgccaatgctatgctgggagtgtccatggcagcagccagggcagcggcaggcgcgctgcatatgccgctgtatgcttatctgggaggtaccaatgccaagaagatgccggtgccaatgatgaacatcatgaatggcggcaagcatgcggataatactattgatatccaggaattcatgatcatgcccaccggtgcgtgctgcttcaaggaaggtcttagaatgtgcgctgagatataccacgtattgaagaaactcttaaaagaccagggatacagtacggcggtgggagatgaaggcggattcgcgccgaatcttccggatgccaaggaagccctgcggttcatcacggaggccatcacaaaggccggatataagccgggagaagacattgtcatagcgctggacgtagcggccacggaattgtatgacaagagtttcaagaaatatgtgtttgaaggcgaaggcaggatgcacggccataaagtcatccgatcagtggaagaactgattgattattatgaagaacttgcggaagaattcccgattgcctccatcgaagatcctttggatgaagaggactgggaaggatgggaactactgaccaccaggatgggcttggatacgcagctggtgggggatgatctgtttgtcaccaacaccagaaggcttaagaagggaattgaacgggaagtggccaatgccatcctgatcaaggttaatcagataggaacgctcacagaagcattcgatgcgattgagatggctcaaaaggcaggctacaagacggtcgtatcccaccgctccggcgagaccgctgatcctatcatagcagacatcgcagtcgcgtttaatgccggacagatcaagaccggggctccttgccggtcggaacgggtgtccaaatacaaccagctgctcaggattgaagagcgtctgggagatatggcagtatatgaggatccttttggaacttcggacgtgctgtaagattttcggttttctttagatttcttttagaaatcttttatgcaacataaagaaaatcttaaaatttagagcgtaagatgagagccaggaggtgttgatatgcatatgatttcggtaatcataccatgttttaatgaagaagaggcactgccggtctattatgaagccatgaccaaagttatggaacagatggatatggcagaattcgaattgctatttgtagatgacggttctaccgaccgcacgcttggaatattaaagagtttaaataaaagggatgaacggtgcaggtatctgtccttttccaggaattttgggaaagaggcggctatctatgccggccttggcaatgcgaagggggattatgtggccattatggatgtggacttgcaggaccctccgtcgctgctgcccaagatgtacgagattttggaaaatgaagaatatgacagcgtggcaaccaagcgttccactcggacaggagagccaaagatccggtctttcctgtccgaaagtttttataagtttatcaaccggatctcaaagacggagattgtaaatggcgcgcgggattatcggctgatgaagcgcaagatggtggatgcggtgttggaaatgagcgagtacaaccgtttttcgaaaggcatcttccaatgggtaggattccgtaccaagtggctggaatatgaaaatgttgaacgggcggcaggggagaccaaatggtccatgcgcaaactattcctgtattccctggagggaattaccgggttctcggtggcgccgctctccctggcctcgatcgcgggagttctgttctgcctgatatcgtttttgatgatcgtagtaatagttgttcggacgctgatctggggagaccctgtatcaggctggccgtccttagtgtgcatcatttttatggtgggcggcatccagttattctgtacggggatcgtagggcagtatctgtctaagacgtatctggagacgaagcaccgcccaatattcattctgaaggattccagcgaggacaaggacggaggggcattatgatccgctccaggctgaaatggtacgtgctgtttgcgggaatcacgctgcttttgtgctgggtgttcgtgggacagtatggcattttcggctctaaggtagactggatcagccagcacagcgtaattccggactacttccgtcagcagttttatgagaccggcagtctattcccggaatttgccatgaatcttggcggcggccagaacatatacaattttgcgtattatgggctttacaatccggtaatacttctatcctatgcgcttccctttgtgaagatgggcgactatgtgatggcagccagcatcatcagcctgatagcggcagtctgtcttctctacgagtggctggataaaagagggtttcaaagaagcgtctgtgtcgcggtaacgatgctgtatctgcttgcttcccctatgatatttcattcttacagccaggtgatgtttgtcaattatatgccctttttatgcatggcatttttgggggtagatgcttattttgaaaagagaagatgcgggctttatattgcaggggtattcctgatgatcatgagtagtttctattttagcattggaggaatgctctctctggtaatatatgggatgcatagatattttgaggcgaagagatttgtatttcggacgttctttaaggatggcatccggtttctcatgccaatgctgtcagccgtgcttctgggcggcctccttttggttccggcggctatggcccttggcggaggcaggggaggaaaggaaagcatgagtctggcatccctgttgatgccgcaggctccgatataccgtttcgtatatacgccttatggcatgggccttactaccattgccataaccatgctgattaccagcctgacttataaaagaaccagcgagcgagtgctttcttatggatgcgccctggtgtttgccataccaatgttcgcctaccttctaaacggaggactgtatatccgcgacaaagtattcattccgtttcttccgctgatctgctacatgatggctgtctacctgaagaaacttggaaatagagagatttcttttataaaagggatagcgccttacctgatcacaatcctgcttttatatctgggaagaggacaggaagaatacgaaggatactggcagtttgtcatggcggatggaatacttatggcggtcctgttcgttttctattattacaaggacaggaggctgccgtcagtattaatcctgataccatcgcttgcgtttttgatcctgtttaacggagtatttcataagatatccaggcagattgaagatggggatttctatcagaaagttacggattctaagattgcccgggagatcgaagagattcaaaaggatgacccgggcttctaccggattgagcaggcgggggacgaagaggagaatgcggctgacctaaaccggatccacagtatggagcagaatgtttcctccatctattcttcggcatataacacagcttatgatgaattccgtaagaaaacgtatcaggtggagcagccgtataggaacagcctgatgcagtctgtctcccggaatccgctataccgttcctttatgggcgtcagatacgtgattggggatcaggcaccgttaggatatgaactggtgaagtcatcggaaggggtgaagatttaccggaacaccaaggtttcgcctgttgcctatgctacgaaccgttatatatcccggaaggagtatgataaactgacatttccctataaccagatggcgcttacggaatatgccgtggtggagcaaggcgtaggggagcaggaagtcaaggaggcgggacagatggccggaggggcaaaagagaaagattttgccatcccggaactgaaaagagaatgcctgaagattaagaaaaatgccagcggctaccacatagaggcggataaggcagtcacgataaaggttccgatatccgggccggaagagggagacaacatcctctttctccaattcaaagtcaacaatggccaacccaataaggacgtggcgatctggctggaaggcgtaaggaataagttgtcttccagagagcatgtctactataatggaaatacgacctttacctatacagtggaactggcccaggggcagcaggatgcctctttgaaattaggaaaaggggtctacgatatcacagatattacctgctatggaatgagttgggatgaagaggccgggaagaatctgtatcagtctgtgttcgaggctgataagaaacggacgaaagggaatcggattgcgggaactatccaggcgaaggaagatgaatatttcattactacgattccatatgacaaaaactttgacgttacggtggatgggaagaagaccagggccaggaaggtcaatacggcatttctcggatttcccataagcgaaggacaacatcagatcgagattgtctatcatgccccgggcgctggctttggtaagttcctgtcgcttttgggggctttcatggcagcagccctggtgatcacatccagaaaaaagagcgccaagggcatccagaatcttccttaaatagcccagattttccttgctatatcttgtctcctgtgctagaataaatatggtttatccgcaggaggtgtaaaaagtggagatagtaaagacgattttaatgatcatatttgcaatagactgtatcgcgttaacggcaatcgtgttattgcaggaaggtaagtcagcggggcttggtaccatcagcggtatggctgatacttactgggggcggaacaaaggccgttctatggagggcgcgctggtgaagtcaacgaagttcctggcgattctgtttattgtactggcagcagtgttgaatttaaaagtatttgcataagataaagcatatttttatgagaatggtgggacactcctgtatgggagtgtctctttgtatataagatggaggacttgtaagagatggacaagacaattgaaaaaagaaaaaaggtcatctatgacttgatctgtgatgatttatacgtgccaatgaagttcaaagaacttgccatgcttctgcaggttccaaaagatcagaggaatgaattcagggagattcttgagaccctggaggcagaaggcaagatctacctttcacagaaaggaaagtacttaaaaggagaggctaagaggattcagggcgtttatcgggccagcctgaaagggtttggattcgttatggttcccggcgaggcttcagacatatttgtggcggaagaagatgcgggcggggcttttgaaggcgaccaggtagaactcgtcataacgaaggagcctcagggcagaagccgggaaggcaagatcgtaagaatcctctccagaggaatcacccatctggtagggctgtatcaggggaacccgaataagagttttggattcgtcaagcctgataaccagaagtttccgcatgatatctttgtgccagtggagaaggccaatggcgctgtgcaagggcataaagtcgtggtggaattgacttcttacggcggaccgcaaaagaagcctgaggggaaagtggttgaaattatcggccatatcaatgatcctggcacagacatcctgtcgatcgtgaagggatatgatctgccggtggaattctcggaaaagatattaaaccaggcgcagcgtgcggccagagacgtatccgatgccgacagggcagggagaaaggatatccgggactggcagatggtgacgatcgacggagaggatgccaaggatctggatgacgcagtatccgtggttaagaatggggagaactatatcctgggggttcatatcgcggatgtgaccaactatgtccaggagaacagcgcaatcgaccgggaggcgcttgagcggggtaccagcgtgtatctggtagaccgggtaatcccgatgctgccccatgccctttccaatggcatctgctctttgaatgcgggagaggacaggttggccctcagctgcatcatgacggtaaatcctaagggcatggtgatagcccatgagatagcggagaccgtcattcatgtggacgaaagaatgagttatacaagcgtcaagaagattctggaagaccgggacgcaaacgagataaaaaggtatgagaagctggtgcctatgtttgaacggatgcaggaactctctggcgtcctgcgggaacagaggaaaaggcggggatcgattgatttcgacttcccggagacgaagatggtgctggatgagaatggaaagccagtggaaatccgtccatacgagcggaatgtagcaaccaagatgattgaggatttcatgcttcttgccaacgagacggtggcggaagattatttctggcaggaacttcctttcgtttaccgtacccatgaggcgccggatgacgataagatccgcacgctggcgacatttatcaataattttggatattctatgcatgtgggagccaacgaagtaaagcctaaggaagtgcagaaactgctgggcaaggtggaggggactcctgaggaggccctgatcagcagactggcgcttcgttctatgaagcaggccagatatacgccggagaataccgggcattttggccttgctgccaattattatacgcatttcacctcgccgatcaggcgttatccagatcttcagatccaccggatcatcaaggataatctgcgggggcggatggacgcaaagagaatagagcattaccaggggatactcccggaagtgaccatgcactccagcgagatggagcgcagggcagacgaggccgagcgtgaaaccatcaagcttaaaaaggtagagtatatgcaggcgcatatcggagaagtgtttgaaggcgtgatatccagcattacaaaatggggaatgtatgtagaactccctaatacggtcgaaggcctggttcatgtcatcaacatggtggatgaccattacgagtatcagcaggagcggtacgagatggtgggaacccgcaggcataaggtatataagctgggccagaagatatccgtccgcgtaatggatgcggacaggcttcttaggaccattgattttgagattgcagatgaaggagagttggaagatggcgaagacgaatggtaagatgatagccaataataagaaggcataccatgattatttcattctggagaactatgaggccggcattgccctgcatgggactgaagtaaagtccctccgcatgggcaaatgcagcatcaaagaggcatttatccgcgttgagaatggcgaggtatatatctatggaatgcatatcagcccttatgaaaagggaaatatattcaataaagatcctttgcgggtacgcaagcttctcttacataagtcggagatcaataaacttcttggcaagactaaggagaagggtattgcaattgtgcctcttaaggtgtactttaaaggaagcctggtaaaagtcgagattgggcttgcaaaaggcaagaaactatatgacaagagacaggatattgccaggaaggaccagcaaagggaagcgcagagagacttcaaggtccggaatctgggttaggaggaagaagatggtacctagaagcaaggaagaattaagaaatatggtttctcagacgacaatagagacttacgaagaactgactccccaactgatacaattgatcgaccagaccaagcatgatgaatcattgacggaggcccagaagcaggacgagatatccttgcacatgatgggatatataaagtcatgcaccaatgaaatcataatcgaagttcttgctgagatattgggattggaagattcacaataaatatactagaagaaaaaggagaaatagaaatggcttattgtgtaaaatgtggagcgaaagtgaacgacggtgtgcaatactgcccgcagtgcggcgcaaagattccggtgatgccgggggcaggccagcagcaggacagccagcaggattattcatatcagcagaatggccagcagggctatacataccagcagaacagtcagcaaggctatacaggccagcaaggctatacaggccagcaaggggaattcttccagcaggaggatgtacgccagaataaggtaatgggggtcttgtcatatctcggaattttggtattcgtaccgcttattgctggaaataagcagtctccctatgttagattccataccaatcagggactggtgcttttcattgcgtctgtaattgtagaactgctggacggcagatggatctggggattccattctatgatcaatttcgggggcagctggttttcctggatgtttgacatctgcagcctggtattgtttgtatttatgatcgttggaattgtgtatgcatgcaaaggagaaagaaaagaattgccggtgatcggccagataaaaatattaaagaattaaggcttgaaaatcaaggcagccgccatcaatcagatgatgcgcggctgcctttttatattaatattcaggatgtttatatgaaaaaggggaaattcccctgagagcgtgggacctggtccctctatattaaaagttattcaatcgtaattaattttggctgctcttcctgcttctgaatctctttcgggaactgaagcctgaggattccatctttaaatgctgccttaatgtcctcctgagtcagggcatcgcctacataaaaacttctgttgcaagttccggtatagcgttccttgtggatgcagtttcctttggcatccttttcttccttggattcgctcttattggcggtgattgtaagatagccgtcttttaagtctgccttaatgtcttctttggcatatcccggaagttccatctctataatgtaactgccatccttgtcatgaatgtctgtcttcatgatctgtgaagatgagttgtcatatggacgggtaaagaatggatccttgaacatatcatcgaataaattgttaaaacctctgtttgcaagtaacataagtcattcctccttgatttatctttatttttgatttgttttatttgttatagttattatataacacgaattgttagcactgtcaagtattgagtgctaaaaatatagaaaaatttttgggatttcgtctttgatagtcatgagggctttacaagagcctttcgcagacaatttggaatgagtccaaacgaataaaagaaaaccacgccgcctattccggaagaatataaggaattctaagcggtatgggtcccggcatacaggcgcagggaagaatatgtgctatcggactaggcgaaggcagaagagtatgatagaatgccctgcttcttgcatattgcgcggtttcgctggtgatataaggaaattgggattaagatttgacatttggggcaatgctatatataatgataacgacaagagatgtctgcgagccagtagtacagcgaatgatcagggcttgtactggtttcgacgggggtctggaagttggagaagccatccgtagcgggacactacgttaaaagttccaattaaatataaacgcagacaatagagaattagcgtacgctgcctaattaggcggcagtcggccccggatcttccgccgtctgggtcaccggcttcaaacaggcggagcacttcgtttccaaagctttgagggaatggaagaacttatgaagctactaaagtcggcagcctgtcattaggcggctgatggagggaatgtcaatataatgactgtgatgggagatgctttgatggatgggctttcggacgcgggttcaactcccgccaggtccactaaaaaacgccgtagttacggcgctttttttatgtaataatataagcattagatctgagccaggaaatcactaaagatcttgcaatgcagttcctcatcaagcgacagccgggcaagcatcttcgatacaagcggatccttgatttcttgcgcctgttttgcatatgccttggcggcaaaccgctcagattcggcattcttagacaacagcgtctgaacgtcgcagctatagtctaccatatcgccgcaccagtacgattcgggatctgaggagcggcattccggctgagccccaagcagggtgatgagttggccgagtatggagaaatgatgctgttccactacggccatccgttggatcagccgccggatgccttgataatcgttgctgatcgtccaggactggaacaggtattggtgcacggtcgtcatctcgctggcagcagaggcaaagtcaggcataagaatatgcgcataacgcaagttcttttccgagacagcgacgttaggataccaattggagtgaatgactggaatagagtttggatttgcgtggatattgtatcgaatattgctcataatacatcctcctaaaaatctattaatataattaccactttatgaaatatggcgtgagtatagaaccggtcggccaacaccattagtaaaggcgtaaaagggcttgagtctgaagaatgccggaatatggatgtaactatgcttcgatatatgcttgacagttatctggatcttaggttctgaaagtgcagggattacatttagattggaattttatggaattcagggtatactatagataggaacaataatcggtgcagcaggaatgaggaagggagtgggcagtatgacagaaaatgtaattattacgattggacgccagtacggaagcggaggacgggaaattgggatccggcttgccaaaaaactggagattcctctctatgaccacaatctggtggcaatggcggcgaaggaactgggcatcagcgaaaaggaagccaaggaagccgatgagacggctctggaaggatttctgtcctcctatatagtaggccccggcgattatacggcctatatgaatgcggaagactatatgcgacccttaagcgaccgggtataccgcacgcagtctgagatcataaagaggctggcagacagaagtccctgcgtcatcgtcggacggtgtgcggattatatcttaagcgactgccccaaatgcatcagcgtattcatctgcgcggataaagaagacagaatccgcagaatagcggccctcagagatctgcctgagagaaaggcggcagaaaagattaagaaggttgacagggagagaagatattattacgagtccaataccggagaagagtggggcaaatcaggcacataccaggtggtattgaatgtaagccggaccggtatcgaaaaggcggtggatatgctggctgccctgtttaatgggctatgtgattagtaggcatattggcgcctgccgcttgcttaagacggatgtcatgcaaaaaggaactgctgcttattctgcggcagttccttttgaagttgtggatggtctgctaaccaaaaagtttcttgtcgaactccggatttgcataataatagttctttgcatccagtctgtccttggtcttttccaatgcttctccgaaacgctggaagtgaaccacctctcttgcgcgtaagaaccggatcggatctttgatctccggatcatcaacgactcttaagatattgtcataagtggtccttgccttctgctcggcagccaagtcttcgaacaagtcagtgattgcatcgcctttggattggaattcgcaggcattaaatggaattccgcctgcagcttgcggccataatccggaagtatgatcgatgtaataagcatcaaatcctgctgtcttagcatcttccggagacatatccttggtcagctgatagatgatcgcgcagacaatctccagatgcgccagttcctccgtaccgatatcggtcagaagtccggctacttccttgcatggcatggtgtaacgctgggaaagatatctcatagaggcagctaattcgccgtcgggcccgccaaactgactgatgatcaattgtgctgtcttagggcaggtctttgatatcttaaccgggtattgcagtcgtttttcataagtccacattaaatatgccctccttcccaaggagtcggcccttccgcccaggaatgatattcacatgagcagtccagagtcagaggtccgaattccttcgcatatttctgcatcagttccttcctcttggatgcggcctgctggaaatcagacttggcgattgaatccatcggatgggtatccagatataaggtcaggtcattgaatacgaaactgatctcgttgatcttctgcagtaatgcatgtctatcttccatcaatgccacctcccataaagaaaggaaggtccagttccttgaagaccgttcctcttgctaaagcctcttcaggttcatacagctgtccatatatctgcatgggaatagcagccattgccaggacgcaagtacattcctgacgggtgttctgctggtttttgtccataaagatcgactcctttctagccaaagtggcttgtatattgctatacactactattatccccgacgcaaggcatgttttatgttataatataaatggtaatttcacaaagacgacatatttctttggtatgatttaagaaaagtaatggaacatctttggatggaggttatgtcatatggaaaaaattaaaattttgatcgtagatgatgagagcaggatgcgcaagctggtaaaagatttccttgggcgggaaggctatctcgtccgggaggcaggagatggcatggaggccttggaaatcttctacgaggagaaggatattgcgctgatcatcctggatgtcatgatgccaaggatggacggatggcagacttgcagggagatccggcagtcttcccaagtgccgatcatcatgctgacggccagatcagaggagcatgacgaattgcaaggattcgagctgggtgtggatgaatatatctctaagcctttcagcccgaagatcctggttgccagggtagaagcgattctaaggaggtcccacgcgattggaacaggggatgtgatcgatgcgggcggaatcataatagacaaggcggcccatcaggttaagattgacgatacagagattgatttaagttttaaagaattcgaactcctggcctactttgtagaaaaccagggaatcgccctgtcccgggagaagatattgaacaatgtgtggaattatgactatttcggggatgcaaggacgatcgacacccatgtaaagaagttaagaagcaagctgggcgacaagggaaactatatcaagacaatctggggcatgggttataaattcgaggtagaggcatgatgaagcattcaatcaagcggcagatgattacggtctttattggcctgctggcatccatggtcctagtgcttctgatcattaacgtcagttttctggaaccatattatatcagcaacaaagagacgcaatttatagatatgtatgaaaaactaagccagtgtatggaaaagggcacgatggaggacaaggaagtgtctgtgaaaatgatccatttggcggagaagaacaatatatcattcctgatcgtaaatgataccacaggaaaaggatataccaatgtctatgactcggatatgctagtaaaccagctgagaggatattcgctgaaccaggcgcagaaggggagcaagattctggaaagcacaaaggagtatcagatcagccagtctttcgacccgtggaaccagacggattatatagagatgtggggaagttttgacgacggaagcagattcctgctgcgcagcccgctggaaagcatcaaagaaagcgccgccgtttccaaccgattcctgatctatattggcagccttctgattctgatatccgtggttcttgtatggtacttttcgaagcggcttacagatccgattctggaactggcggtcttgtccgagaagatggcagatctggattttgacgccaagtataccagtggaggcagcaatgagattggggaattaggagccaattttaaccgaatgtcagagcggcttgagagcactatatctgaactgaaaaaggcaaataaccgtttgctggaagatattgagcagaaggataagctggagaagatgcgcaacgagttcctgggaaatgtctcccatgaattaaagacgcctatcgccctgatccagggatatgcggaagggctgagggaaggagtcaatgaagacgcggaaagcagggaattctactgtgacgtcatcatggatgaagcggcgaagatgaaccagatggttaagaatctgctgacgctgaatcagctggagtttggcgatgaagacatcgtgttcgagcggtttgatctgacggaacttgtaagaggcgttatccagagcatggagatccttgcccagcaggcggaggcaaaggtcatcttccggcagcaggagccagtgtatgtgtgggcggatgaattcaaggcagagcaggtagtacgcaactatatgagcaatgccttccatcatgtgggaggtgagaaggtagtagaggtcaagatgctctcagatggggagaaggcaagagtaagcgtatttaatacaggcgctccgatcccggaggaagatgttgcgcatatctgggacaagttttataaggtagataaggcacataccagggaatatggaggtaatggcatcggcttgtcgattgtaaaggcgatcatggagtctcttcaccagaagtacggattgaataattatgacaatggtgttgaattctggttcgaacttgatgtaaaataaaacgatacactataccgtaccaaagaaaggcaggtcagtacattgatagcaataatagattatgatgccggcaatattaagagcgtggaaaaagcgctgcagcttttgaaccagaaagtagtcatcaccagagagcgggatgcgattttgaaggcggacaaggtaattcttccgggagtgggctcctttggagacgcgatggggaaactgcgccagtatgggctggtggaagtgatagaggaagtagtaaggcgcgggacgccgtttctcggcatctgcctggggctccagctgctatttgagagaagcgatgaggcgccgcagatagaaggccttggcattctgaagggggagattcttcgcattccggatggcgatgggcttaagattccgcatatgggatggaattccctgagattcccgaatcagggaaggcttttcaaaggcctgcccgaagagccgtacgtatatttcgtacattcttactatcttaaggcaaaagaggaggagatcgtgacggctaccaccgagtatggcactttgattcacgcttctgtggagaaaggcaatgtattcgcctgccagttccatccggagaaaagcagcgatacaggaatccagatacttaagaattttgtggaactatagacggaggagagcgtatgcatacaaaaagaatcattccctgcctggacgtgaataacggacgcgtagtaaagggcgtaaattttgtggacttgaaggatgccggagacccggtggagattggaaaggcctatgataaggcgggggcagatgaactggtatttttggatatcacggcaacatccgatgcaaggggaacggtcgtggacatggtacgcaaagtagcggagacggtgtttataccatttactgtaggagggggaatccgtacggttgaggatttcaagatgctgctcagggaaggcgcagataagatctctatcaattcttcggccattaataccccaaggcttatctcggacgcggcagacaagttcggcagccagtgcgtggtggtggcgatcgatgccaagaaaagacccgatgacagcggatggaacatctataaaaatgggggacgtatcgatgtgggcattgacgcgctggaatgggcaaggaaggtcgagagcctgggagccggagagattcttctcactagcatggactgtgacgggactaaggctggctatgacctggaactgaccagagccattgccgaggcggtttccatcccggttatcgcgtccggcggtgcaggaaccatggaacacttttatggggctctgacggaaggaaaagcagatgcggctcttgccgcttccctgttccattataaagaactggagatccgggaggtgaaggaatatctgcggaataagggcgtatccgtacgcctgtagcatggaaggaattagaatatggcagcgattaataatgactggctcgaggctctaaatgatgagtttaagaagccgtattacaagaagttatttgcgacagtaaaccaggagtataagaccaggctgattttcccgccggcagacgatgtcttcaatgcatttcatctgacgccactacataaagtaaaggtagtgattctgggacaggatccctaccataacaatgggcaggctcatgggctgtgcttttccgtgaaaaaaggagtggagattccgccatccctggtgaacatctatcaggaacttcatgatgatctcggatgcgccatcccggaacatggatgcctgaccaagtgggccgagcagggcgtccttatgctgaatacggttctgaccgtacgcgcccatcaggcgaattcccacaggggaatcggctgggaagaatttacagatgccgcgatcatggctttaaatggccaggacaggcctatcgtattcatcctatgggggagccctgcacagcagaaggcaaaaatgcttaataatccgaagcatttgatcctaaaagcgccccatccaagcccgttatccgcattcagaggattctttggaagcaggccatttggcaagaccaacgcatttcttgaggcacatgggatagagccgattgactggcagattgattagaaatagggaggtatgtaatgggaaaacaatatgatctgattattatcggcgccggcccgggcgggtatgttgccgccaagaaggcagcgaagcttggaatgtcggtagtgattattgataaaggagacgtgggcgggacctgcatcaacaggggatgcattcccacaaaagccctggtgcacgcggcaatgctgtaccgggagatgacagaatgcgaaaagttcgggctgtcagcagagaaggtcgggttcgacctgcagaagatatatgagtataaggatctttccgcggcccggatgcgggaggaactggaaaaagaatttaaagaacttggggtagtcagcgtaaggggaaacgcaactatccagagcgacaaaaaggtcagggtagttactccaaagaaggaagaagtgtactattatggcaagtatatcctgatcgctaccggagcaaaagcccgcacgatcgatattcctggtctggaccttcctggagtcatgaccagcgaagaattgctgacgtccaatgagagccagtaccgcaggctgctgattctgggcgggggggttatcggaatcgagctggcgaccgtattcaatgcgcttggcagcgaagtgacgatcgtagaagtatcagacaggctgcttcccaatatggacagcgaattttcatctgcgttggaagaaatccttacgaaccgcggaatcagcatttatagggaaagcatactggaaagggtgacacagcaggaggatggcgtaggatgccattttgtgtataaaggggagaataagcaggttgacgtggatgctgtcctggtatccgtaggaagggttgcgaatacggaaggactctttgatccggatgtccgtgtcaagatggaaaatggaaggattatcgtagatgacttttacatgaccaatattccggggatctatgccatcggcgatgttaccggaggaatccagctggctcatgtggcttcagctcaggcaacctatgtagtggaaaggatgaacgatgtagagccgtccgtcattatcgagatggtacccagttgcctgtttgcctctatttccatcgtacccagctgtctgtacacggatccggagattgcgtcagtggggattacggaagaagaggcccgaagaaaggggatttcccttcgctgcggcaaatatatcatggatgtaaatggacagtctattatttccaaggaagagcagggattcataaaagtactgttcgcggccgacagcgatgtacttttgggcgcccagctgatgtgccagagggcaaccgacatgattggtgaattggctacggccatagcgaacggcctgacttcttcccagttaatgtatgcgatgcgcgcccatcctacgttcaacgaggccatttcctgcgcggtcgaaaacagcagggagcaggcttccagatggtagtggacttgggatgggttccattttgattaatagagtttttaagatttgcgccatggacgaaaatccatggtgttttttcattcctttttcaagattatatattgacaatccataatgaagtgcatataatataaatgaacatatgaataactgttcatatgttcatgcgaagtcataacaatcattcaggaggatttgagatatgaaagaagtagaaagagtgccgggaacgccgggccacgaagcgtgcggatgcggccatgagcaccatcatgagcatgggcatgaagagcatgagcaccaccatcatgaacacgaagaagcagcatcccgggagacggttccaatgccggagggtgttgaaaagagagtgtatattcttgagaatctgggctgtgccaattgtgcggccaagatggagcgcatgatcagggaacttccaggggttaggatggctaccattacgtacgccacgaagcagctggcagtagcggcagaccatcaggaagcattgcttccggaattcagaagaatatgcgcatccattgaggaaggcgtaacggtgacgccaagggattatacgcctgtaaaaaagcaggaaaagaccagcgttatccaggataagaaggcggatatcctggccatagccgtgggggctgtgatgtttgtggcaggagaagtgatagagcatctttatccggcatccttgatcagtgcaatactgtttatagcggcatacgtgatcctgggccttggcattatctggacggcagttaagaatctcgcaaaggggcacgtgtttgatgagaacttcctaatgagcgtggcaacgctggcggcattcgccatcggtgactttgcggaagcggtaggcgttatgctgttctaccgggttggagaactgtttgaagatattgcggtaagccgcagcagatcccagatcatggaagcggttgatctgagacctgaagttgtaaacattgtccatggagacgaagcagagagcatcccggcccaggatgcaaaggtgggggatattatcctgatccgtccgggcgaccggattccattagacggcgtcatcgttgaaggaagaagccagatcgatacctcgccggttaccggggagccggttccggtaaacgtatatccgggaactgaagtctactccggctgcgtaaatgaccaggggcttctgaagatggaggtaaaaaagcctctcagcgagtctatggtcacccgaatattggattccgtagaaaatgcggctgccagcaagccgaagatcgaccgcttcattaccaagttcgccaggatctatactccggtggtcgtagcggtcgcagttgctacggcagtcatcccttcgctggttaccggcgagtggaatcactggatctatacggcgattacgttcctggtaatcagttgtccatgcgctctggtactcagcgttcctctggccttcttctcgggaatcggcgcaggctctaagaggggaattctctttaaagggggagtagccattgaagcgcttaaggatgtaaaggctatcgttatggataagacgggaaccataacgaagggaaactttgtcgtacagcaggtggtttccttgaaaaaattgacgcagaagcagattctcacaatagctgcggactgcgaacttagttcgacgcaccccattggtaccagcatcgtgtcggcggcaagggagaagaacctggaactttccagtccgaaagaagcagaggaaatctcgggcaaggggattcgcgccgtgttcccggaaggaaccgtgctgtgcggtagcaaggggcttctggaaaaatacggagtggatgtcagcgaatataagtcggacctgtatggcacagaagtgctggtagcggtagatggcgaattggaaggctatctggtggtcgcagatgtaatcaagccggaagcaggggcatccgtgaagcgtatgaagtcgcagaatctgattacggctatgctgacaggagatgccagggacaatgccatggcagttgcaaaagagaccgggattgacgaagtccatgcccagctcctgccggaagataaattaagccatttaaagcagatccgtaaggaacatggctccgtcatgttcgtaggcgatggcatcaacgatgcgccggttcttgcaggggcagatgtaggcgctgccatggggaacggggcggatgccgcgatcgaggcggcggatgtggtattcatgacatcctcggtggatgccataccggaagcggtttccattgcaaggaagaccgggaaaatcgccatgcagaatgtagtattcgcgctggccatcaaattccttatcatgattcttggattcacaggctatgccaatatgtggatggcggtatttgccgacacaggcgttgcaatgctttgcgtactgaattcaatccggatactgtacgccagtcaaaaaagtggcaatgcataagaaaatgcataagaaatagttacgaaaatattaattttaattcatttaatgccaaatggttgaaataacaatcaccatttggcataattaataaatgagtgaatatttatacctattggggcataccgcgatagggcttataatgttgaaaggaaggaatgtatgaagaagacagaagtagagtgctgcgatattacatgcattcatgatgataaagtccgtacagtccggcagaggatgccggaggaagaacggttaaaagaactggcggatttttacaaagtgtttgcggatgctaccagaatcaagattttgtggattctgctggaatcagagatgtgcgtctgcgacctggcagagattctggggatgacccagtcggccatctcgcatcagcttagagtcttaaagcagatgaagctggtaaagaatagaagagaagggaagacagtatactattcattggccgatggccatatccagacgataatcagtcagggaatggagcatatcgcggaatagttttcatatagttatcaaaaaggacaatattatgaccgaggaattgaagaaaaggtgtatcatttatgcggtgggggtgtttgtgtacgtatgcgggatagcggtgaccatccagtatacgatgaccgaccaggcaaagttcatatggtttctggcggcatacctgattgtaggctttgatgcctttaaggtgctggaagagaagctggcgcagaagaagttcctgacagagtatacgctgattatacttgctacgattggggcttttggcgtggcaagatatgtagagggcgtacttgttatgctcttatttgaattgggaatgatgtttgaagcctattccacggacagcgccaagcgttccatcaaggaactgatcgatatccggccggaatacgcgacacgcaaggtacacgggaaagaattcaaggtggatccttccgcgctgaaactaggccatattattgtaatcaagccgggagaacgcatccctgtggatgcggttgtcgtctccggaacaacaagcatcgatacaaaggctttgacaggagaagccatgcctcagtccgcatggccgggagaccggatatatagcggatgcatcaacctcaacggggtgatcgaggcaaaggtcacggcgctgtatgttgactctaccgtaaccaagattatggagatggtagaagaggcccaggagaaaagagcggaaagcgaagattttattacaaggttctcaagaatctatacgccggcaatgctggtgtgcgccttgctggtcatgatctatccgccccttacattttcctatgggaattgggatacctggatttacagaggattgatcttcctcgtagtggcgtgcccctgcgggctggtcatgtccattccgattgctttccttggcggcattgcgtcagcagccagacaggggatcgtaatcaagggcggcaactatctggaggacctttccaaggcagataccttcgtgtttgacaagacaggaacgctgacggagggcatattcaaggtgaaggaagtaaaggcagtggggatggacaatgacgagctgcttcgcatagcgtcccatgtggagagttattctaaccacccgatcgcccagtccctgtcagaagcctatggaaaagagatcaataagagcaaggtataccggatgcgcgagatgccgggatatggcgtcaatgcgacctttgagggagagcgcgtctatgtgggaaataagcggctgatggatcgtcagaaggttctttgcgatgaagtaagccggaatggaaccgtcgtctatgttgcgattggcaagaaatatgccggatatatcgtcattgcggattctgtcaaggaagatgcaaagacgacgcttcaatacttgaaggaaaagtgcaaggcagtactggtaatgcttaccggagataccaagagcagcagcctggaagtagccaggaggctgaagatagactatgcgtatgcggaactgatgccagaggataaattagaacagctggaggactttttggaccttcaggattctaccgaacgtctggtatgtgtcggggatggaatcaatgatgcgccggtccttgcaagagctgacgtggggattgccatgggcgcgctggggtcggcggcggcaattgaggcggctgatattatattgatggaagatgaattgccaagaatcgtggacgcgatcaagattgcgaaggagaccttaagagtagtcagccagaatatttcttttgcattgattgttaaggtgctgatcctgatacttgccacaattggctattttggaatgtgggaagcaattctggctgaagtcggcgtaatgttcgcggcgatcctgaatgccgtctgggttgtccgttatactgtttaggaggatatatgaagtatatgaagatagccctgtctgtgatggctgctgccattgtattgacaggctgtgtaaaaaatccatctgaaaaaggagtagaatatctggaagatggaaaatataaagaagcgatcgaacagttccaggatgcaatcgattcggaagtgaatgcaggagatgcatacagaggaatcggaattgcaaaatgggagcaggaagactatgagggagcaaaagaagcgtttcagaacgcgcttgacaatggtgccaagaagactggcaccatctataattttatgggaaactgcgatatgaagctctccaggccggaatctgcccttaactatttccgccttggcatcggccaggaggatagcagcgaggaactcaaaaaagagatgcactttaacatgatcgtagcatatgaacagatgaaggattgggaaagtgcgaaggccaaactaaaggaatacctggcagagtatccggacgatgaagcagcaaaaaaagaattggaatttctggagacaagataatatatgggaaatatgattgatttggaaaaagagaccgaacgggtcatcctggtaggcgtcagcgtgacggatgaggatgacacccagaagtcgttagaggaattgaaggatctggcttccactgccggggcggctaccgtgggcgtggtgattcaaaaccgggagcaggttcatccgggcacctatgtaggcaagggaaagatagaagagatcaaaggtctgatgtgggaactggaagcgaccgggattatctgtgatgatgaactatccccggcgcagatgaagaaccttcaggatgagcttgacgcaaaggtgatggatcggacgctggtcatactcgatatatttgcgtcccgggcttctaccagcgaaggtaagattcaggtagaactagcccagttaaaataccgccaatccaggcttaccggttttggcacggcgctttccaggctgggaggcggcataggtaccagagggccgggagagaagaaactggagatggaccggaggctgatcaaggggcggatcgcccaactgaaccgggaattgagagacgtgaagcgtcaccgggaggtcacaagagagcagagaagccgcaaccggattccggtggcgtccatcgtaggatataccaatgcaggaaagtccacgcttcttaacacgctgaccggggcaggaatcctggcagaggacaagctgtttgcaacccttgacccaaccaccagggaattgaagcttcccagcggacaggagatactgcttacggatacggtaggatttatccgcaagctgccacatcatctgatagaggcttttcgaagcacgctggaagaagccaggtatgcggatatcattctacatgtagtagatgcggccaatccccagatggacgagcagatgtatatcgtatatgagacgcttcagaatcttggagtgacggataagccgattgttaccatattcaacaagcaggacaaggcacaggacgatgtcatcatccgggactttcatgcagattatacggtcaagatctccgcaaagacaagggaagggataccggaacttctcaagactattgaggcagtgctcagacagcagaaggttgccattgagaatctctatccttatcaggatgcggcaaagatacagatgatccgaagattcggggaactgcaggaagaagaataccgggaggacggcatctttgtcagggcttatgtacctgtggatatctatgaaaaagtcaaggtttcccggggggattcgccgaaaagcgccttataagagcgggagaatgtggagtaatccttgaatccgcagtcaaaacaggcctgcgtgctaggcacgccggataatatcaagtcttttgctagcaggagccgcttctgggagatatagcgtcccatagtatagccggtctcctgcttgaatagtctcatcatataatatttgctgatgtagaaggtgtccgccagatggtctatgctcagatccctgccaagattctcgttgatatagcgcaggatatccagaaccttcacgttgcagttgtcggtatcaatgaattccagccggttctttctcgcggcgcggttcagatgtatcatgaattccaggaaaaggacctggcggtataatccggctgcatatccatcgtcggaaaaggatttttccaactgggtgatgaagcggaacagagaacttctctccagggatgggatgcgaagaacgttggaatgctcttcttcggctttctgaaagcagtagctaagatcataggaatccgtctgataggcattgatgaaattgggcgatatatatacgatgatccgttcatatacggtagaattatctacaatcaggcggtggatgtcattgtgctttaccagcacgatatcataagggatgagttcatatgattttccttccaccatgtaattgacatttcctttgataaatatggtgatcttgtcaaagtcgtgataatggtattccacctcccgggtctcctgatccgtaaggtggaacagccggaattcgctatttaagtatcctttttttacatattgttccataagggcgcctccttcttagagtttatcttatagcaagagagcattatttgcaatatactaagcacgatttgtgttgaaacgggaaataatgcctgatatgatagagatataataacggggaacaataaggacaatcccaatggaaagacggaggtatgttatgaaggttgtgttggaacgttatcatgggctgggaaatgattatgttgtatttgaccctaataagaatgaactggaacttacatcggaaaatgtaagaatgatctgtgaccgtaatgaaggacttggctcagacggcgtgctggaaggaccaatcctgaaagaagatggaatgtatgtaaaagtctggaatccggatggaagcgagtcggagaccagcggaaacggagtcaggatcttcgcgaaatatctcaaggacgcaagttacgtacagaagaaaaattttaaactctatacaggcaacggacctgtggaaattacattcctgaatgaagacggcagccgccttcgcgtatccatgggaaaactgtctttctggagcgacgatattccggttacaggagagcgccgggaagtcatcaatgaagatatggtatttggaagaaccttgtatccggttacttgcgtatccatcggcaacccgcactgcgttatcccgatgcgggagatctcgaagccgctggtatgcaagattggcgattacgcagaactggcaagatacttccccaaacggatcaatacacagattatgaaggtgattgataaagagcatgtggcaatcgagatctatgaaagaggcgcaggctatacgctggcttcaggaaccggcgcatgcgccgccgccggagtagcctataagctgggaatgaccaacaacaaggtcatagtacagatgccgggcggcgagcttcaggtcgagattgaagaggactggaacgtatttatgacaggcgacgtgttctatgtggcaaagattaccctgagcaatgagtttgttgaaaaattaagagcggtataatatactaaggcatagggaggaaaacctatgcctttacaatttatattcgggccgtcaggctcgggaaaatcatatcacctataccatcagataattgacgaatctaggatccatcaggagcagaattatatcgtccttgtgccggagcagtttacgatgcagacgcagaaggatctggtcaatatgcacccctgccatggaatcatgaatattgacgtgttaagttttgtcaggctgtcttaccgcgtgttcgaagagacgggcggagggacgctgcctgttctggacgatgaaggcaagaacctgattcttagaaagattgccggagactacgaaggggaactcaaggttctgggggggaatatgaagaagcttgggtacgtcagcgaggtgaagtcggtcatctccgagttcgcccaatatgacattacggaagaagaactcgaacgcgtcatggagacggcgggagaggaatccaggctatactacaaactaaaagacatccaggtgctttacagaggattcatggagtatctggaaaagaaatatattacaaaagaggaactgctggatgttctaagccagatggtctgcaagtctgacatgctcaagaacagcacggtagtgctggacgggtttaccggctttacaccggtgcagaacaggctgcttctggaacttatgatccattgccgcaaggttgtgattacggtgaccatggatgaccgggaagatccttacgtctatcagcacccataccagctcttcgggcttggaaagcatatggtgaccacgctgatgcggcttgccagagatcatagaatatcggttgacgaaccggtctgcctgtatggcaggcctccttatcgttttaaggatcatgattccctggcttttctggaaagaaacctgttccgctatcatgggaagggattcggaaaagagccggagtcgatgggcattcatgtgacaagaaatccgaaggaggaggccatggccgtggcaggagcaattcgggcgctggtaaggaaagaaggataccgttaccgggagatcggcgtcatcgtaagcaatatggacgtgtacggagatgatctggagcaagcctttgccatgtatgagattccggcttttatggatcataagagaagcatactgctgaattcctttgtcgagtatatcagaagcctgcttgacatggcagaacagaattttacttatgaaagcgtgttccggtttcttcggaccaacctggcagggtttaactttgatgaagtggacaggttagagaactatgtcattggcctggggatcaaaggctataaaaggtggcaggagaaatgggtacgccgcttgaagggaatggaagaagaggaattggaggcgttgaaccactgccgcataatactggtagagaaggtagacggcctgctctatgtactgaagcagagaagcaagacggtgcgcgacattaccatggctctgtatgaattcatggtgcgcgaggatctgcaggtgaaacttgcggctttggaagaacggtttcaggcagaaggggaactggcgcttgcaaaagaatacgcccaagtatacaggatagtaatagaactgttcgacaaattcgtagaacttctgggggatgaaaaggtcagcttgaatgaatactgcaagctgctggatgccggcctggaagaagcgagagtaggcgtaatcccgcccagtgttgaccaggtggtggcaggagacgtgcagcggaccaggcttaaggatatcaaggcgctgttcttcgtgggagccaatgacacatatcttccggggtcattgcttcgaaccgggctcctgtccgaaagggatcgggaaaaatttgccagggagaggctttctttgtcgccgggaggcaaggaacaggcctatatccagaagttttatctctatatgaatcttacaaagccgtccgaacagctgaatatctattacagcaaggtatctgcggacggcaagagcatccgtccgtcttatctgatacaggaattgagacggctatttccattgcttccggtgcaggatgaggaaggccgcgcgcttgcgctgcgggagattacggagaagatgggaattggctatctgattcgcggttttcagggaaatggggaaggcatggacgcagcatggaaagaactctatacctggtacaagaagagccctaagtggcagagcaaggtggagagcctgttaaaagccgggtattaccgccggcctatggatggattgacagaggccgttgccaaaaggctttatggggaagaatttgaagacagtattaccagaatggaaaggttccagacttgcgcgtttgcccacttcctgacctatgggctgaatcttcaggaaaggcaggagtatgatttccaggcggtggatatgggaaatgtgtgccataacgcgcttgagcgcttttcccggaaggttgaaaaagaaggctgcggctgggttggattaaaagaggagaagcgggcttccttcattgacgaaagcgtggaagaggcgatcacggactatggcaattcggtattgtatagttccgcaaggaatgaatatatgatcgtgcgcatgaagcgcatgctggagcgtacggtgtgggcgcttaccaagcagctgtctgccggggacttccagccttctgcctatgaattccggtttgcgaacggcaagatcgaccggattgatacctgcgaggatggggataaggtctatgtaaaggtgctggattacaagaccggaagcaaggcgttcgatgtggtggccctgtatcatggactccagctgcagttgatggtgtatatggaagcggcggtaaaagcggagcagaaaaagcataaggagcaggaagtcgttccggctggcgtgttctattaccggatccaggatccgcttgttgacaagcaggaagaggcagcggtggaagaggcgctattgaaggaattgaagccggatggaatgattaatctcaaagatgaggtgcttcagcatctggaacaccggacggaaggggaatccctggcagttccggtgaagtttaacaagaacggaagcctggcaaagagttccaaggccgtgccggaggaagaattccagatcatgatgcggcatgcggcaagaaaagtagaagaaacccgccagagcatcttaagaggagagacgaaggcctcgccatacagaagaggccaggagaccggctgtgattactgcaagtaccggcacgtatgcggatttgatgtgaaggttccgggatatgcttaccgggatatcggaaagatgagcaaagaagaagcgatcgcggctatgaaccaggccgcgtctggctcgacagtaaacggcaagaatgcagatagaaagagtgcagataaaaagaatgcagatggcagggaagccgcttcgaaaggagaagaataggtcatgaaagttacgtggacaaaggaacagcagaaagtcatagacctgagaaataggaatattctcgtatcagctgcggcaggctctggcaagacggccgtcctggtggaacgcattattaccatgctcacggaggatgaaagcccggtagatgtagatcggctgctgatcgtaacatttacggaggcagcggcggcggagatgaaggaacgtatccgcaatgccattgagaagaaactggaagaatacccgggtaacgagcatctcaagcagcaggccactttgatacacaatgcgcagattacgacgattcacagtttctgcctgtcggtgatccgggatcattttcacgcgattgacattgatcccggctttcggattggagaggaaggcgaactaaaacttctgcgacatgacgtgctggaagatatgctggaggatcggtaccagcggaatgagcagagattcctggacttcgctgctgcttatggcggcgggagaagcgataagaaggtggaagaactagtgctgaaaatctatgagtattccaggagttatccggatagtgaaggatggctgtcctcctgcttggaggcctataaagcggacagccttcttgaattggagaaaagcggctatattcttctggtgatggataatgtgagacggtatctggacgacgccggaaggcttcttaataaggggcttgatatctgcaatgccccggatggacctgcggtctatgaagcggctcttaggagcgatctgcggataatcgaagaactacgggaaacgcgctcgtttacggaacttggagaaaagatgaatagcgtaaagtggatgaggcttgcagccaaccgggataaggcggtgtcggaggaaaaggcagccaaggtaaaggcgatccgggaggaggtaaaggggctggtcaaagatctggccggccagtatttttatcaggacgcgccgggaattcttgaagaccttcagatctgccgtcctgcgatggaggaactggcaagccttgtccgagagttcgccgaaagattcgaagaaaagaagcgctccaaaaatatgattgacttctctgatatggaacagtacgcgctgaggattcttaccgataagtcggacgaaggatttgtcccttctgtcattgccagggagtaccagcagcagttcttagaaatcatgattgatgaatatcaggatagcaatctgatacaggaagccatcctaaccagcatctctaccgtgtctgagggacgttataacatattcatggtcggggatgtaaagcagagcatctaccgattccgcttatccaggccggaactttttatggagaaatttaatacttatgatacggatgacagcaagacgcagagaatcgaccttcataagaacttccgcagccgacgggaagtgctggaaggagtcaactatatcttccgccagatcatgacccgggaactggggggcatcgtctatgacgaccaggcagcgctgtatgtgggcgcggattataaagatggagaaaatatggagacagaggtgctggtcattgacagcaacgtggatgcatgggaagatgaggcgcaggccgtccggggaattacggaacgggaattggaggccagggcgatcgccgggcgtatccgggaattaattcatcaccaccaggtgacggacaagaagaccggggaattcagactggcgcgctattcggatattgtcatactgacccgcagcataaaaggatttgcggatgtatttacggaggtgttgagcaaagaaggaattccaacctatgcaggcaccagagaaggatatttcgcaacccaggagattggggtgattctggattatctgcgtgtcctggataaccagaggcaggacatcccgctggcggcggtgctggcctcgccgatcggcgctatgacggaggaagaactggcgattataagaagcagttataaagaacggcccttcttccaggcggtatcagactatcttgcaggaggcgaagatgagtccatccgtggcaaactgggccggtgcctgggccagatggaggcatttcgcaaggtggttccttatacgcctatgcatgaactgctgcatatggtgctggagaagaccggctacggcgattatgcctgcgccatgccgggaggcgagcagagaaaggccaatcttgacatgctggcagagaaggcaagggtttttgaatccaccagttataaggggctgttccattttatacgctatatagaacaattgcagaagtatgacgtggattatggggaagcaagtattgaagatgagcagtctgacacggtgcgtattatgaccattcacaagagcaaaggactggaatttcccattgtgttcgtagccggaatggggaaacggttcaatatgcaggatgccagaagcagcgtggttctccattcaaaaatgggcgtgggcctggacgcgattcatattgccaacaggacgaaaagtccaagccttgtaaaaaagattatccagaaggaagaagcattggacagcctgggcgaagaattaagggtcctctatgtggcattaactagggctaaggagaaattgatcattacgggaactattccaaatctggagaagaagatgccgctctatgagatggggattacatttggccgtcttagcaaggcatctacttattgggactggattcttccggcagtatccagcgtaccgcccgaggttcctatcgcagtaaaaaggatagcatttgacgatattgtaaaagaagaagtcatagaagagactgccggaaggatgaccagagcgatgctggaagcatggaataccagccaggtctatgatccggccatgcatgaggcgataaaagagcagtttggatatcagtatccatatgccggaagcggaatgcagaaattgaaatttaccgtttccgaacttaagaagagaatctatctgaaggatagcctgggcgaagaattggacgaaacgggcgaactattatatgaagagcctgaagtagttccgctcattccaagattccttaaggaagaggaagaactgacaggggcttccagaggtacggcataccaccgcctgatggaacttctggatcttgcacaggattacggggaagcggaactggcggacgcagtgagcgcatacgtggaagaaggaaagatggacgcggatatggctgcctgcatacggcacggcgatatcctgggctttctaaatggcggggcaggaaggcgaatgaaagcggctgcccgggcaggcaccctatggagagagcagcccttcgtgctgggggtggacgccagagaaatgtaccccgaagaacaggaaggcgagctgatcctggtacagggaatcatagatgcttactttgaagagtcggacgggctggtagtcctggactataagacagaccagatatatacgccggaaggactgatagaacgataccattcccagctggactactatgcgaaggcgctggagcagctgacacacaaaaaggttaaggagaagattatctactcctttactataaagaaagagattcgattgccatgacacagatattagctgcatatataatactcataaatattgttacattctgggtgttcggacatgacaagcgccaagccaggaacaaaggctggcgcgtgccggagaagaccctcttccttttggcggcagccggagggagcattggcgctatagcaggaatgcagatattccgccataagaccagacactggaagttccgcctgggaatgccgctgatattgggagcgcagtgtgtggcggggtggtggattttggggacgtaggattgtgggagaaatcgcctggaagccgcaagaagtacatattcctatcattttgctcaatgctgctttggggctaagttccaaagatttctattgctaaacttccgctactaaaataaatccggtgaaaagtgtaaactaacgcaggcacacctcgcagaattgccaaaaaattgccggtagcctccccgccctccccgccctccccggcgtaccacaatccccaattcccaaaattccacaaaaatattctcacaaaaaatataatatgtgttgacaaatcatattatacgacatataatataaccatcaaaacaatattgtaatgaaagatatattataaaattccagcaaaggagtgagaatatggtatttaacactggagccgctcttctggacgccatagtactggcggtcgtatccagggagaaggaagggacttacggatataagattacccaagacgtaagaaaggccattgaagtatcagaatcaacattatatcctgtgctaaggaggctgcagaaagacgaatgtctggaagtatatgataagcagtttgacggacgcaaccggcgctattataaggtgacggaaaaaggtatggcgcagttgaatttatatcgggtagaatggagaaattattctttgaagattaatgaattgtttgagggaggtgtgactgcatgaaccgcatagagtttatgacagaattagccgcattattacaggatgtgccggtcgaagaacgcagagaggcgatgcagtattataacgattattttgatgatgcgggagacgagaatgaagagcaggtgatatctgaattaggaagccctgcaaaggtggcggccacgatcaaggccgatctgggaagccaggccggcgattacgcggagtattcggagaatggatataccgactccaggtttgaccagaaggagatgccggcaggcagggcctatcagaggaaggaagagaaagaaccgccaaaaaccagcagagcgctgaagatcgtactgattatcgcgatcattctggttggagcgccagttctgattccgctgggagtagggataacgttggcggtgcttggatgcgtaattgcgttgttctgcgcttttatagcgctggtagttgcatccgtggcagtggcgattgtagggatcgtggtattcggtgttggaatcgctacattgattccggaacttgccgtaggattggcgctagtaggaacaggactgatactgacggtgctgggcgtgatagcaaccgtagcaagcgtgaaactttgcctggtagtattcccggggatctgtagaggaatcgtatggatctgccgcaggccgtttcaaggaaaggcggtggcataagcatgaaaaagggatggaagatattctggatagtatgcgcggtaacggcagcgattggttttgtgtgctgtgtgatcgccaaggtactgggtgttacgacggatatgatagaaggacgttttccccatggtatagtggtattttcccacaactatacggtggatgattatatcaatgacgatgatgacataccccttgcgagtgatatgaaaaatagttatagcaacatagccgaaatggatgttgacatattcgcgggtcaggtgaaggtggtgctttccgacgatgcaaaagatgtaatggtcgagacgaggggcatcaacaagcggctggggcttaagtgctatcaggacggcgacgaattaaagataaagtctaaggaaaggatatggcatgtcaacaatgtggggtcaggaacgattacgattaccctgcccagggacttaaggctgaatgaggcatcctttgacattggagccggtacgctggatatagaaaagatttttgcccaggatctgtatgtaggcgtgggagcaggcgatgcgaatatcacacattttgaagcaggagaagtggaatttgactgtggagccggaagcatccgtgctaatggagatgcaaggtctaagatcgatattgacggtggagtgggcgaggttatcctgacggttgccggagaagaatcctcttacaattatgatatcgactgcaaagtaggagaagtcatctgtggaaatactacttattcgggcttagccagcgaaaagaatattgacaatggggcttcaagagatattacggtagattgcggtgtggggaccattacaatcaattttggaaatgcattatagcgggggcgttcaaggaaactagacgcgtcaatgaaaggagaattataaaatggaacagaaaagattatacagatcacgggaaaaccgcatgatatgcggggtatgcggaggcatagccgattatttcaatgtagacccgacgctgattcgtctgggacttgtgttattagcttgtactggttcaggaatcctggcttattttatagcggctattataattcctgaccaaccaagaacatattaatcttcaaagaggggaaagcatccgtacagggtgctttttccatgtatatggcaggcaggaggcgctgccagtatattccagccaaaaggtgtcaatacttactaaaaaatgaaaggggtattgtactatggctggaaagaagaataaaccgatcaagctggatgaactgacgcaggaagaaaagatgaaatacgagatcgcagaagaactgggactgttggacaaggtaatgcaggagggctggagatcactgtcatccaaggagacaggcagaataggaggcctgatgacgaagaaaaggcgggaagcagagaaaaagtaacaaaaatattacgaatattaattagtgtgaacaattggtgataaaggttgaaaagagggtatccatttgctataatcgaaaaactggtaaaaatattagcaggtgaagttatgagcgataagattaaagttttagatattgatatagataactgcacggccaaggaagccatgaaagaaaccatggagtatctgaagtctgagccggtaagcgtgatagagatggttacggtggatggattgatgcagatggacgaattgccggaactcaaagagaatatgcaggaattcgatcttgtactggctggggataagacaatcctggaggctgcagatatcacagaccgcaagttccttcaggagacagaaggtcatttgttcctgaagatgtttatgcgataccttcataagaaccataagagaatctatctcctggtggagacggaagaagaaggccaggagttctacgactaccttcagagatactatagcggactccagattattgggctggcaaaggtatcggcacagaaccgggcagatgatatgctggtcaatgcgatcaacggcggcgaggtggactgtatcttcgcgacgctgtcggcgcctcttcaggaggactttattatgaagaaccggagtcttctggatgcccgtgtctttatcgggctggggaaggaaagccttccggtaaagaaggcaggcctcgggcagagcaggatcggacagttccttatccggcgcattttcaagaaagagatagagaagcgcaagcgcagcgagccgaatcaattctctcccgcaaaataaataagaaaattataagatttgacttttcgtcactatgtacatggacaaaaactgaatattttattaaaatcttgaggaaattaacaaaaatatgtgatttcctctttatttttttgttgatatatattaagatagaattcagtagtatgcattttggctactttttcaagtaatttgttgtgaaaaatgcatattgaaatgagtggaggagatggaatatgatatctaatcaaatacttcaaaatacaattgaaggattgaaagggattacacgaattgacttctgcgtaatggacaccgatggtaaatctcttgcaagtacattttcagaacaggacaactatgaagaagaggcagtctccttcgtagaatccccggcagacagtcaggttgtacagggatatcagttctttaagatttttgacgagcatcagttggaatacatcctgcttgccaatggaggcagcgatgatgtatatatggtgggaaagattgccgcgttccagattcagaatcttttggtggcttataaagaacgatttgacaaggacaatttcattaagaacttgctgcttgacaacctgctcttagtggatatttacaaccgtgccaaaaaattacatattgacacagaagtgagacgtgttatctttattattgagacaaagcacgaaaaggacagcaatgctctcgacaatgtgcgcaatctgctgggcaatcggacgaaggacttcgtaacggcagttgatgagaagaacatcattgtcgtaaaggaactggagcctggcgacgggcatgaggaactggagaagatcgcgcagaacttgtatgggctcctgaaggaagatggagaagaagagattctgatcgcctatggaaccatagtcaatgacattaaggaagtgtctaagtcttataaggaagcgaagcttgccctggacgtgggcaagatattcttcggggagcgaagcgtaatcgcctacagcgctttgggaatcggacgcctgatataccagttgccgattccgttatgcaagatgttcatacgtgagatttttgaggggaaatcgccagatgattttgatgaagagacgttgactaccattaacaaattcttcgaaaataatctgaacgtatcagagacatccagacaattatatattcaccgtaacacattagtttaccggctggataagcttcagaagagcacggggctagatctgcgcgtgtttgaagatgccattacattcaagatcgcacttatggtcgtgaagtatatgaagtatatggaatcactggagtattaataatcaggaggaaagtatgattgaattaaaagaagtaacgaaagagtactcgaaaggggttgcagccctgaacggcgttaacctgaaggttgagcagggtgaatttgtatttatcgtaggggacagcggatcaggaaagtctacgctgatacgtttgatcatgaaggaactggaccctacatcaggaacgattgtcgtaaacggacagaacctgaaccggatgaagcacaggaagattccgatgtacagaagaggaatcggagtcgtattccaggatttccggcttctgaaggacaggaatatctatgataatatagcatttgcacagcgcgttacagaaacgcctacccgaatcatcaagaaaaaagtgccggcggcattatcgctggtagggctggcccagaagtacaaatcatatccaaaggaactctccggaggagagcagcagcgtgttgccatcgcaagagcgatcgtaaatgaaccggcaatcctgctggcagatgagcctactggtaacctggatccgacaaattcttgggagattatgaaactgttggaagaggcgaatgacagaggaacaaccgtattggttgttacgcataaccaggagattgtaaacgagatgaaaaagcgagttgttacaatgaagaagggagtcattgtaagcgacgagaaaaaaggtgggtataataatgagaattagtacagtaggatattcgatgaaacaaggggtgaagaacattggaagaaacaagatgttctctatcgcatccattgcgacgatggcagcgtgtatcttcctgttcggcctgttctactccattgtcatcaactttaactatatcgtggaaaaagcagaagaaggggtggcgatcaccgtattctttgaagaggatgctaccaagagccagaaggataagattggcgatgaactcaagacggctgatggcgttcttgaagttaactatatcagcgcggatgaagcgtgggataagttcaaaggcgattatttcggagagtcaggggatcttgcggaaggattcaaaagtgacaacccgctggctaattctgacaactatgaagtctatatggaagacgtatccaagcagaaggatgtcgttgcatttgcggaaggcctggaaggggtccgcaaggtcaacaagtcggatgttgtggcaaagacgctgacaagcgtgaataaattagtgggctacgtttccgtggcgatcattgcgatcctgctggcggtatccatattcctgatcagcaatacggtcaccatgggtattacggtaaggcgcgaggagattgccattatgaaatacataggcgcgaaagatggattcgtccgggcgccgttcgtgatagaaggtctgatcatcggagcggtgggagccgtgattccgctggtgatgctgtacttcatgtatgacaaggcgatttcttacatcatgaccagattcagccttctgaataatattgtagacttccttccggtggcaaccgtctataagacgctgcttccagtgggaatcattctgggagtcggaatcggtttccttggaagtttctttacgatccgtaagcacctgaaagtataatttttaagggggatacatatgatacgagggaagaggttgataagccttcttctgacgcttatgctgtgcttaggcctggccatccaggtaaatgcggctgatcttagcgatacgaagaaaaaggcgcaggaactggaagaaaaaaagaaagcggcagagggcgagaaggcgtctctggaggcacagttaagttcgatcgtctcggagatggaggataccaagacaaagatcgacaagaaagaggccgagataacagagaaggaagacgagctgattcaggccaaagtcgatgagaacgaccagtatgaaagcatgaagaagagaatcaaatatatgtatgagaacggcaattctcagtttattgagatcttgtgcgagtctaaaagcataggtgattttctcaacaatgcggagtatattacgaccatttctgaatatgaccgggatatgctggtagaattccaggaggtcgtaaagaaggtggaagaccaagaggcggcgctcaaagaagagtacgccgaattagagacgatgcagaacgacctgatcgcgaagcaggatgaagtatccggccttatggccagcaaagaggacgagatcagcaagttggacagcgagctgggagacaccaaggataaattgtcccagctggaggcggcagcggcagctgcgcagcgtaagcagaaagaagcgtccggaggcggaggcggttcagctggtgcggctgtggttactggcaatggaacttttacccatccttgtccgggatattcttatatatccagtccgtttgggtacagggaacagcctttggcaggcgcaagcacgaaccataaaggcattgattacgcggcgggaatcggaaccccgatctatgcagcggcggcagggacggttgtctcagcaggatacagcgggaacgcaggaaagatgatcgttatcaaccatggaaacggattgacgacgtattacatgcattgcaatgacctgtatgtaagcgcgggacagtcggtcagcaaagggcagaacattgcggctgtaggaacaaccggaaattctacgggaccgcatcttcatttccaggtaaatttaaatggcacaccggttaatccggcaaattatctataagaacaggatttaattagatgaaaaacaaaaaagggtttttgcagggggcgctttgcggcgcccttgctatgttattggtggcagggcttgtatcctgcgggttaaaaatgaaggatagcggcagcgggaaagacgctgtcgatggcagcacgcagaagaaggtatcggaattaaaggaattgattgatcagaattatatgggcgatgtagatgaaaagcaattggaagaaggcatctacaaaggctttatcagtggactggatgatccctattccgtatactatgacaaggaagagaccaaatccctttatgagaccaccgagggagagtatcagggaatcggcgcggtgctgagccagaatatgaacactggcatcattaccctggtgcagatttatgatgattctcctgcgatgaaggcagggcttaaggataacgatattctctacaaagtaaatggggaggaagttaccggcgtagaactgacggaggttgtctcccatattaagggggaaaaaggtacgacggtagagatgacggtgctgcgaggcgctgacaatgaagaagtgacggtgaccgctacccgggataccgtcgaggcccagacggtcaagtaccggatgatggatggccagatcgggtatgtgtcagtctctgaatttgacagcgtcacctatgaccagtaccagaaggctcttaaagacttagaaggccaggggatgaagggactggtagtggatctgcgcaacaatcccggaggcaatctgaataccgtctgcgacatgctggatttgatgctgccaaaagggctgatcgtatatacggaagacaaggacggcaatcggcaggaggcctcgtcagatgatgagaaccagttcacgctgccgctggcagtattggtaaatggtaatagcgccagcgcttccgaaatctatgcaggggccattcaggactacggaatcggcgatattgtgggaacccagacatacggaaagggcgtggtacagcagatctttgacctgaaggatgatacctgcgtgaagttgaccattgcaaaatactttacgcctaaagggagaagcattaacggaaaaggaatcacccccgatgtagaggttgagtatgaggcggatgagaataatccggaagccgacaatcagctggataaggccgtggaaacgataaaaaacaaactgtaagagccaaaaatccactgggaatgccaaatggggcattcccttttattattccatgtgataaaataaactacagtatggaattctatgccccatggggcatgctgtcatgccaaggcagggacagcggaaaggaaagcatatatgacgatattaattaaaaatggacatgtcgtcgatccgcttacaaggatagacggagactatgatgtgctgattgaagataaccgaatcaagaaggttgcagcaatgatagaagaagcggcagggcaggtcatcgatgcgaagggctgctatgtcatgccggggttcatagacttgcatgtgcacttcagagatccgggcctggaatataaagagaccctcaagaccggaggcgcggctgccgtaagaggcggcgtcacgacggtgtgtgctatgcccaacaccaagcccgtcattgacgatggaactaaagtcagagatgtgcatgaaagggcaaaaaaggactctcttacaaatgtgattcagatcggggcggtaacaaaagggcagaatggaaaggaactggcagacattgaagggatggcgaaggaaggctgccatgccatcagcgaagacgggaagtcggtgatggatgcctccctttacagaaagggaatgaaggctgccaaagaatgtggaatctcggtttttgcccattgcgaggatatcaacatggtggaaggcggcgtgatgaacgcggatgagaatgcaagacgtctgggaatgaaaggaattaccaactccgtggaggatgtgatcgtggcaagagatatcctgctggcgaaggagaccggcgtgaggcttcatctgtgccactgttctacagcggacagcgtggagatgatccgcctggccaaggaagaggggctgccggttaccggcgaagtgtgcccgcatcattttaccttgtgcacagatgatatcaaggaagatgatggaaattataagatgaatccgccgcttagaagcaaaaaggatgtggaagcattgagaaaagggctaacggacggcgttatggatgtcatagctaccgatcatgccccccactcagaagaagagaagaaccagtccatggaaaaggcattctttggaatcgtcggtctggagacgtctgcggcgctgacttatacggaattagtaaagccaggcattcttagcatcatggatatggcggaaaagatgagtttcaatccggcaaggatcttgggacttggggagaaaggctctgtatccgaggggaagattgcggatattgtgatctttgatccggacaagtcctacgtcattgataagaatacttttgcgtccaaaggaaagaatacgccgtttgacggctatccggcaacagggaaggtaaggtatactctggtagatggcagaatcgtgtacaaagatgagaaaaactaggaggtagaagagttgattaaccagttgattgcaaatataaaaaagacggaagcccccatcgtagttgggctggatccaatgttaaattatattccggaacaggtacagaagaaagccttcgaagaattcggcgaaacgcttgagggggcagcggaagcaatctggcagtttaataaggagatcgtagataagacctatgacctgataccggcggtaaagccgcagatcgccatgtatgaacagttcgggatcccggggcttgcggcatttaaaaagacggtagattactgtaaggaaaaaggtctggtcgtcatcggcgatatcaagagaggcgatattggctccacatcagccgcttatgccacaggacatatcggcagggtccaggtaggggacaaggcctatgcgccgtttgatgaggatttcgtaacggtcaatccgtatcttggctcggacggagtgaatccgttcctggatgtatgtaaggaagagaaaaaaggcatattcgtgctggtcaagacttccaatccttccagcggagagttccaggatcagttgatcgatggccgcccgctctatgaactcgtaggcgagaaagtggcagcctggggcgaagaagttatgggagatgcgtacagttatgtgggcgccgttgtaggggcaacttatcccaagatgggaaaggcgctcagaaagatcatgccgaaagcctatatcctcgtgccgggctatggcgcgcagggcggaaaaggaaaggatctggtacatttctttaatgaagacggcctgggggcgatcgtcaattcctccaggggaatcattgccgcctataagcaggagaagtatcaatccttcggtcctgagaactttggggatgcctccagggcggccgtaaaggacatggcagaggatatcaagggggcattggagaaccgcgcataagcaaagatcggatgaaggggataggaggacaaagatgagcaagtataaagaacaagcagtcgtcgtcgcgcaggagagaatcgcgacagatatctacagcctgtggattcagacggcgaatattgccgcagaggcaggaccgggacaatttctgtccgtatataccagagatgagagcaagctgcttccccgtcccatcagcatctgcgaggttgataaggataagagctatatccggctggtatatcgggtgaccggaaagggaacagggacgcagcagtttgcggcattgaaggaaggcgaccaggtcgcggtcatggggcctctgggaaatggcttcatgacgaattgtccgaggaaggcatttcttatcggcggaggaattggaataccgccgatgctggaactggcaaagcagttagactgcgaaaaacagattatagcagggtaccgggacgaattattcctgacagaagaactaaaagaatatggcagcgtctatgtggctacggaagacggaagttctggaaccaaggggaatgtactggatgccatccgtgaaaacgggctggacgcagagattatctatgcctgcggaccggcgccaatgctccgggcactgaaggcatatgccgaggaaaagaatattccatgctatctatctttggaagaacggatggcctgcggcatcggcgcttgtcttgcatgcgtatgccagtccaaggaagtggatggccacagccatgtgcataataagcgggtctgcaaggacgggccggtattcttggctacggaggtggaattataatggatacgagaattaatcttgctggcgtagaacttaagaatccggtcatgacagcatccggaacctttggatccggggaagagtatagcgaattcgtagatcttaacaggctgggggccgtcgtcaccaaaggcgtggccaacgtgccatggccgggaaatgctacgcccagaatcgcggagacaaaatgcggcatgatgaatgccatcggactgcagaatccgggaatcgacgtattctgccggcgggacatcccgttccttaagcagtttgacaccaggattatcgtgaatgtctgcggacggacaacggaagattattgcgaagtggtggagcgccttgccgatgaagcagtggatatgctggagatcaacatttcctgcccgaatgtaaaagaaggaggcattgctttcggacagaatcccaaggcggttgagacaattaccgcggaggtgaagaaacgggccagacagccggtgatcatgaaacttagccccaatgtaacagatattacagagactgcaaaagcagcagaggcaggcggagcagacgtgctttccctgatcaacacgctgacagggatgaagattgacattcataagagggcatttgccctggccaacaggaccgggggactctcgggaccggcgattaagccgattgccgtcagaatggtctatcaggtgggcaatgcggtgaagcttcccatcatcggaatgggcggaatcgctacggctgaagatgcaatagaattcctccttgcaggggccacggcggtttccgtgggaacagccaattttttcaatcctgccgcaaccatagaagtggcggaaggcatcgagcagtacatgaagcagtatggatttgcccatgttaaggatatgattggcattgttaaatagttgaagaaggatgctataataacttgatgcaccataatcacagaaggtgccataaaaaggagatgttgactatggaacagtataaacgggaatttatcgaattcatgattgactgcgaagtattaaaattcggagactttgttaccaagagcggcaggaacacgccatttttcgtaaatacaggattttaccgtacaggagcgcagctacgcaaattgggcgagtactatgccaaggcgatagaaagcaagtttggctttgactttgacgtgctgttcgggccggcctataaggggattccgctgacggtggcgacgacgatggcaatcagccagttctatgacaaggatatcaagtattgctccaaccggaaagaggtcaaggaccatggagacaaaggaatccttcttggaagccccattgccgacggagacaaggttgtaatcattgaagacgtgacgactgccggaacctccattcaggagacgctgccgatcatcaatgcgcagggagacgtaactgtcgcgggcctggtagtttccgtagaccgtatggagcggggacagggagaaaagagcgcgctggctgagattgaagaaaaatacgggcttaagacgacggctatcgtaacgatggcggaagtggtagaacatttgtacaataagccatataaaggaaaaattattattgatgatacattaaaagcagcaattgacacatattataaacagtatggcgtgaaataagaccaggagggattatgatgaacgagagagcgtataaggctatgagttttgccggggcagtcaatattgcggttggaattgtgatagcagtcgtaggagttgcggcaggagtgctggcaatcatcagtggagcacgcttactgagagagaaaaaagggcttactttctaagaagtccggattgaaagggtgcttgatttttgaattcaaagagcagaaaaagaatccgtattctcggaaagatattgttcgtactgtatattatatttattatttactttctgatattttccgattggtacggacgcacgggagagatgcaggagtaccattataatcttgtgctttttaaagaaataaaaagattctgggagtatagagaccaggttggcatgtttgccatgtttaccaacctgttcggaaacgtaatcatctttatgccgtttggattctttatgccgatggccagcaaatacagaagtttactctcgacggtattctacagtttcggtctaagcctctgcgtagagactttccagctactcacaaaggtaggaagttttgatgtggatgaccttctgctcaatacgattgggggactggcaggctacatcttattcgtaatttgcgcggcaataaggagaagacatgtttataaaaagaaaaataaccacagaagaagatagggcaaaagccattgcaaagaccagggaaaagcagagaaagaaaatgatcaagaccaagtatggccaggcgcctcttcggcattcaaagaaggggatatattcctgcttttacggcgtggtcgtatttatcctgctggttcttatgctgatcatcgcatttgcaagcaagggagaggtgaatatcctaataggattcatcggacttggtacgctggcgctatcctttatgggcctgctgctgggcgtgcggggcttccgggaaagggataagaattacataacgtgcaaggtgggaattggcgccaatgcggccttcctccttggactgactgcaatattcatcagggggctgttttaaatgatagaagaaagatatgaattggcaattggacgtatccgtgaaatagaaaaagagagcacggttggcagtgaatttcgggattatttccacgagatggcaggatttgccatcatgatagacgaactgcggacagaacttcaaagcggcagataccaggcgctggaattagaagaacttaaggaatggaaccacaggctgtatcaggatattcttccggatcggtatgaggccagttatgggaatccctcttatgccgtgaaccggtgcgggaaggactacggcttagccttaagctttctgtatgcggaacttaggggagccattgcctatacattcgagcagaaaacggaatatctggatattctatttgaacttctggtcgaagtatacaatcaatttgaagaagagccatatccggcgattgaaagtataaaggagactatatattggtatgccagcgattattgcgacgtattcgtcgcagaccggatccgggagcagattgacccggatgaaacctttgccgcaggcatcattatggacagcgaccttgacgatataagatacctgtaccagttcggcgagtatataagcgagaatgaacttcagacggccaggcatctgatgaaactggatgacgcggtcataaagaggatggccgatgtctacacggaaggatatcggatcgggtttgtgaataccggaaaggatctgtcaaggaagtccgcggttaatatccgctatgtccttggatttgagcgggtcattaaaaaagccattgctaattttgagaagatggggcttaagccggtgatctaccgttctggcgtaagcgtcctgaccaaaaggcagcatctaaagattgggtattttggggcggtcgcgaataagcagtatgagtatgaccataggaatgaccaggcgctgtttctggataaaaagttcctggaacggaagctggaagtcgtcaagactacgtatgagagttgtaaggagttggctgccgggtttgccggccccgcctgcattgagatgtttggagaagagccttttgcgcccgagcagaaggaagacgtattgaaactgtccgaaaagcaggaggagcttgttctgctcttcgacagccgccagagtcagattaccaacgagtatatccggggggatgagagaagttttactatcgtggcttatccggtcccggagattggcgagaggtatgaagagatcttcgatgagattatccgaatcaatacgctggacgccgggacctatgagaaagtacagcagacgctgatcgatgcccttgatcagggagaatatgtccatattctcggagataatggcaatcggacggatctgaaggtccagttgtatccgttaaaggatccgcagaaagagacaatatttgaaaactgcgtagcagatgtaaatattccagtgggagaagtctttacttctccggtgctggaaggaaccagcgggttgctccatgtaagcaaggtctatctgaatgaactacagtataaggatctggaaatcacatttgccaatggaatgatcgcggattataactgcgggaattttgaccgggaactggagaataaggaatacatccatgataatattctccataagcatccgaccctgccgcttggagagtttgcgatcggtacgaatacgaccgcgtatgtggcggcacgaaagtacgggattgaagagaagatgcctattctgattgcggagaagatgggtccccactttgcggtgggcgatacctgctatagctggagcgaggatatcaaagtatataatcccaatgggaaagagattgtagcccgggataattccgtgtccatccagcgcaaggaagatgtgtccaaggcatatttctactgccatacggatattaccattccttatgaggaattaaagagtattacggtcgtgacgaagtcaggagaggaaatcgctcttcttgaaaatggaagatttgtccttccgggaacggagattctcaatgaaccgttgaaaaatgcagataaataatgtatcatgaacccatagtgccggaagccgggatagcgcggatccggggcagttatacgagaaaggatgaagattatgccaaaagtaggaattgtgatgggcagcgactctgatctgaaagtaatgagcaaagctgcagcaatgctggaaaaattaggaattgactatgagatgacaattatctctgcacacagagaaccagatgtgttctttgaatgggcaaaggcagcagaaggaaagggaattaaggtaattatcgcaggagcaggaatggcagcgcatcttcctggaatgtgcgccgcattattcccgatgccggtagtcggcgtgccgatgtcaggcaagaacctgggaggagaagacgcgctgttttcaatcgtgcagatgccgcctggaattccggttgcgaccgtagcgattgacggaggcatgaatgcggcgattctggcagcaaagatcctggctacctctgatgaggaactcttaggcagattaaaagaatattccaaagagatgaaagagactgtccaggcgaaggctgcaagactggatgagatcggctatgaggaatacctgaaataaaagaatagaatgatgaaaacaatatacaaggagatatgttatggattataaaaatgcaggtgtagatattgaggctggctacaagtcagtggaacttatgaaagagcatataaaacagactatgaggccggaagtcctgacgaatatcggagggttctcaggagctttttccatggaggcgtttaagaatatggagaagcctacgctggtatccggaacagacggcgttggaacaaagttaaaactggcatttattatggacaagcatgatacgatcggtatcgactgcgtggccatgtgcgtaaatgatattgcatgtgcaggcggtgagccattattcttccttgactatattgcgtgtggaaagaacgagcccgagaagatcgcgaccatcgtgagcggcgttgccgacggatgcgtgcagtcggacgcggccctgatcggcggggagacggctgagatgccaggattctatccggaagacgaatacgatcttgccggatttgcagttggcgtggtagatgagaaagacctgattacagggaaggaattaaggccagaagatgtgctgattggcatggcttcttccggcgtgcacagcaatggattctcccttgtccgcaaagtctttgagatgacggcagagtcgctgaatacatattatgacgaactgggaactacccttggggaggcgctgcttgcaccgaccaagatctatgtaaaggcattgaaaagcgtgaaggcagcaggcgtgaagattaaggcctgcagccatattacaggcggcggcttctatgagaatatcccaagaatgctctgcgatggagtatgcgcggtcgttgaaaaggacagttatccgataccggcaatttttaagatgcttgcaagggaaggccaaattgaagagcatgctatgtataatacctataacatgggcatcggcatgatggttgctgttgatccggcagatgtggataagaccatggacgctatgaaggcggcaggagagcagccatatgtggtgggacgcatcaaagcaggagaaaagggagttacgttatgctaaatgtggtcgtgctggtatctggaggcggtacaaatctgcaggcaatcattgatgccatagaatccggaaccattaccaatacaaagattatcggagtgatcagtaacaataagaagtcctatgcactggaaagagccaggaaccatggaatcgagaatctttgcatatctccgaaggactatgaaaccagggcggtcttcaacgaaaagttcatggaagcggtagatggaatgaatccggacctgatcgtgctggctggattcctagttgtcataccgccaaagatgattgaaaagtacaggaatcggattatcaatatccatccatccctgatcccttccttctgtggtaccgggtattatgggctgaaagtgcatgaggcggcgcttaagcgcggcgtgaaagtggcgggggcgaccgttcattttgtggatgagggaaccgatacaggcccgatcattctgcagcaggcagtggaggttcaaaacacagatacaccggaagtgcttcaaaggcgcgtgatggaacaggcggaatggaagatacttccgaaggcgatcgatctgattgccaatgggaaggtgacggtgacggatggcatggccagggtcacagactaagcaaacgagataagaagaatagaatgattcatacataggaggtccgaaatgaaggttttgattgtcggaagcggcggaagagagcatgcgatcgcatactgtgtcgcaaagagcgagaaggtagataaaatttactgcaccccgggtaacgccggtattgcagaatatgcacagtgcgctcccattggagcaatggaatttgacaaaattgtagcatttgccagggaaaaagagattgaccttgtaatcgtgggaatggatgatccgctggtaggcggcctggtagatgaactggaggcggcaggaatccgcgcattcggacccaggaagaacgcggcaatcctggaaggttccaaagcattttccaaggacttgatgaagaagtacaatattccaacggctgcatatgagaattttacggatccgcagaaggcccttgcatatcttgagacagccaaattccccattgtcctgaaggcggacggactggcgctgggaaaaggcgtgcttatctgcagcaccctggaagaggccagagaaggcgtaaagacgattatgctggataagaagtttggctctgcaggcaatgagatggtcatcgaagaattcatgacaggccgcgaagtatccgtcctatcctttgtagacggcaatacgatcaagaccatgacatccgcccaggatcacaagcgggcaggcgatggagacacggggcttaacactggcggcatgggaacattttctcccagcccgttctatacgaaagaggtagaggaattctgcaacaaatatgtgtatcaggcaaccgtggatgcgatgaaggcagaaggaaggccttttaagggcgtcatcttctttgggctgatgctgacagaggaagggccgaaagtcctggaatacaatgcaagattcggagatccggaagcccaggtggtccttccgagaatgaagaatgatattattgaagttgtggaagcctgcattgacggaacgctggatcaggttgacctggagtttgaggacaatgcagccgtgtgcgtcgtcctggccagcgatggatatccggtggagtacaagaaaggacttccaatctcaggccttgaggaattcgagaagcatgagggatactactgcttccatgccggaaccaagtttgatggagaccggatcgtgacgaatggaggacgcgtgcttggcgtgaccgccaaagggaaagatctgaaggaagcaagagaaaatgcttatgcagcgacacagtgggtgcagttcgacaacaaatatatgcgtcatgatatcggcaaagcgatagacgaggcgtaagatatggatcataaatagatgcaagagggcaggcgagtttttcgcctgccctcttgctgcatgaaagaaaaacagaagactagtagttacccaactcggccagatagcggtcgatcttctttaatcttttttcgatccctttcaccttgtggctgatggtatcaagaagcgcttctgcaacaaactgagggcctgtcagtgaattgaagaatgcgttgctgtctaccggaactgtgaagagagtggtggcatactgtgccagaagcgcgcttggcttgtctgtaattacgatgatattggctttggcttcctgcgccattctggcagtaatcttatcaatagaagaatatcttggaaaactgaacataatcaggcagtcatccctggatatgttacatatatggtcaatagggctgatggcggaactgctggctgattctacatttggtaccatatgcttcagatatagcagaaaatagtcgcccaggcatgagttgcctctggaagccacaatgtatttgcgcttgcttgatatgatagtgtcggcagcttcttcgaacgttgcgggagcgttatggaccagggcggactccagatttttagccgcgtttttaaaatgccgattaatataatcggagttgctttcgagttttgccctttttaccacccgctgtgccggtaccgtaatagtactggagatgcttagcaccttatcttgataatcctttctcaaagatttctggaaatccatgaatccgctaaagcccagcgaccggctgaaacggataacggatgactcgctcacccccaatttcatagctatctcggtggatgtcatgaagcaagcatcagccgaattgtctaagacatactggccaatcatcttttgcgttttcgttaaattggcactatggatggtttctctcaattctttcatatgtttacctccggcagaacaggaatatgaaaattcccctctcttaatttataattagatttaatcatgaaatgaggaaatatgcaagtgcaattgtgaatacaattgacatattattaacacaattaaaagtttttgtgaaaaaaataacttttattgaataatatagacgggtgtgttagtataattttagagacaaatgaataatattcttcacaaagcaagaacggtgaaaaatattgttcattcaaagtcatgtgccggaacgaacggcaggcaaaatataattatttaattacaaactaggaggtaaattaaagtgaaagtaggatgcgtaaaagagattaaaaacaacgaattccgtgtaggtatgacacctgataatgttaagagttattcaaacgcaggccacgaagtttatatcgagaaaggtgctggacttggatctggatttacagatgaagagtatgtagaagctggcgcaaagatgatcgatactgcaaaagaggtatgggatacagttgagatgatgatcaaggttaaagagccattgccagaggagtatccattattccacgaaggattgatcctttatacatatcttcaccttgcagctgataagccgcagacagatgcactcttaaacggaaaagtaaagggtgttgcatacgagacattgatcgagagaaacggaagcattcctcttcttgctccaatgagccagattgctggacgtcttagtatccaggaaggtgctaagtacttagagaagacatacggcggcgaaggcgttcttcttgccggagtaccaggaacaccgaaggctaacatcgttatccttggcggcggatctgttggaacaaacgcttgcaagattgctgtaggtatgggcgctaacgtaacgatcatggatatcaatcttcagagactggcatatcttgatgacatctttggggctcgtatccagacattggtatccaacgatgcaaatatcgagagagcagttaaagaagctgaccttgttatcggctgcgtgctgattccaggaaaagctgctccgaagatcttcaagaagaaatatctcaaagagatgaagccaggcgctgtatttgtagacgttgctgttgaccagggcggatgcggcgagacaacaaaggttacctatcatgatgatccgatcttcatcgaagaaggcgttgttcactattgtgtaggaaatatgccgggagcagttccgagaacttctacgatcgctctgacaaacgctacattaagttatggccttcagatcgcaggcaaaggcttagagcaggcttgcaaggacaatgacgttctatactctgcaatcaacacatatgatggaaaacttacctgcaagaacgtagcagatagtttcgattgctatgagtatgcagatgttaaaggtctgttttaattaattcgacaatttccaaacttaattccttcaaagttgcgaaaggggcttacaatttaggttgtaagctccttttagttgtgttatattatgtgtataacacaacgaatgatggaaaaggtgatattatgctgatagagattgattttaacagtgatgaggcgttatatgtccaattgcagaaccagattattatgggaattgccatggatattatccgggagggcgacgcgcttccatccgtaaggcagatggctgacactgttggcatcaatatgcatacggtaaataaggcatatacgattttgaaacaggaaggatttatccagctggacaggaggaagggagcggtcattgccattgatgtggataaggccagggcgcttctggagatgaaggaacagcttcggatactgcttgcaaaaggaagctgcaaggatatttccagagaagaggtacatgctttggtagatgagatatttgacgagtatagaaagggaaagacacaatgaattatacggaacaggcaaatgatgttttgagaattgcgaagaatattgcaaaagaattagatcatccttatgtaggaacagaacacctgcttctaggcctgagaaaagtctataccggaatcgcgggccaggtgctggccataagcggagttgatgaagaaaagatattaaaagtagtggatgaactggtatccccggtgggaagcgttgcgcttgcccataacccggagatcagcccgaggcttgcatatattctggaagagagcaaggcagaagccttgcggttccagtctaatcagattgggacggagcatatgcttctttcgctgctgcatgagacggactgcgtggccacgagaattctgctgactttgaatatcagccttcagaagttatatcaggatatcctatctgtccttggcgtggatccgaaggagtatcaggaggaactgctgcaggagtccggcaagaagaaggaaggggttgcacagcagtatggcacggatctgaccgctcaggcaaaagaaggaaaactggatcctgtcattggacgggaagaagagattggcagactgatgcaggtattaagccggaggacgaagaacaatccctgcctggtaggcgagccgggggttggtaagacagcagtgattgaagggcttgcagctaagatcgcatccggaattgttccggaaggcatgaaggataagagaatcctgactatggatctggccggtatgattgccggttctaagtatcgcggagaattcgaggaaaggatgaagaagttgatccatgaagtaaaggccgcgggaaatatcattctgtttcttgacgaggttcatacgattataggcgctggaggcgcagaaggtgctatcgatgcatcgaatatattaaagccatctctcgcaagaggcgagattcagttgattggagccaccacgattgtagagtatcgcaagtatatcgagaaggatgccgcattggagcgacgttttcagccgattacggtggaagagcctacccaggagcattgcctgaacatactcaaaggcctgcgggcaagatatgaggctcaccatcatgtacagatagaagaggaagcgcttgaggcggcggtaaagctttccagccgctatattaatgacaggttcctgccggataaggcgattgacgtactggatgaggcgtgctctaaagtaagcttaagaggctttagggtgccggatggcatcttcgccctggaagaatcggtgaccgaactgtcgaaagagattgaggaggagatctgccagagaaatatgacggaggcatccttgttaagaaaagaacgggatgaggcggcaaaaaaactagagcagattaagaagcgtttccataaaaggaatgaagacaggacagtggcggttacggaagaagatattgccggcgtagtatcccagtggacgaagattccggtgcagaagttggcagaatcagaaagcgccagactcaataaactagaacagacgcttcataagagagttgtcggacaggaagaagcagtatccgcggtggccaaagcaatcaaaagaggaagggtcgggctcaaggatcccaagcgtcccattggatcgtttttgttccttggtcctactggcgttggaaagacagaactatccaaggcgctggcagaggctttgtttggaaatgaagatgccatgatccgggttgacatgtcagagtatatggagaagcacagcgtggccaagatgataggctctcctccgggatatgtgggccatgatgatggaggccagttaagtgagcaggtgagacggcatccttattctgtcatcctgtttgacgagattgaaaaggcgcatccggatgtattcaacatcctgctgcaagtgctggatgatggccatataaccgattcccagggaaggaaagtggactttcgcaatacggtgattattatgacgtccaatgcaggcgcccaggcaattattgatccgaaaaaactgggattcaatgctaaggaagatgctgcaggggattacaagcggatgaagagcaacgttatgaatgagatcaagttgatcttccggccggaattcctcaacaggattgatgagatcctggtattccatccgcttgataaggagcagatgaggaagattgtcagcatgatgtgcagagaacttgccagacgcgccaaagaccagctgggtattaagctggatatcagggattctgtaaagagtcatattgttgaaacgggcacagataagaagtatggcgcccgtccgctcagaagggccgtccagaaccagctggaggataaacttgcggaagcactcttaagcggagagattacaagggattctgaagtggcggtcggaatgtctaaaaaagaaataaaatttattccaaggactacaaattaaaattgatttgatatataatagggatacaaaagaagaaccttaggaggaaaaaataatggcagcagtgaaagacctattgaaagcggaagttgatggcacgcttagttttggggactacacactagagaataagacaaaactggatggttttgaatttcagggagatttatataaagtaaagacttttgctgagattacaaagttggaaaagaacggcatgtttgtatatgagtctgtgccgggaacggcggttgaaaactttaaggcgacggaagacatagtaacattcaaggtatctggcatgaaagatgctcagtttactctggaattggaagcagacagcgaatatgttgtatacatggatgatgtgaatgtaggcgatatgaagaccaatttaagcggcaagttaagcgtaagtacggaactggagccaaatcaatccgtagaggtaaaggttgtaaagaagtagcagaatatgagaataaagtcagaagggctgcagatagcagcccttctttcagcataggcgatagcgatcgtaaggagatgaatgatggcaaaggcaaaaaaaagcgtattcttctgccagaattgcgggcatgaagaaagcaagtggctgggacagtgcccagcgtgcaaagaatggaatacttttgttgaagagaaggtgacatctgtaaaggctggaaccgtgcgggataagaaggaagctcagatcgtagctttgtcgagcgtggagacggatgaagatgaacgcatgatgacggaaatggcagagcttgaccgggtgcttggaggaggaatcgtaccgggctctctggtgctggtcggaggcgatcctggaatcggaaagtctacgcttcttctgcaggtctgccagaggctggctgctatgaataagaagatattatatatatcgggagaggaatctttaaagcagatcaagcttagggcaaaccggatgggggatttctcccataccctttttcttctgtgcgagacgaatctggatatgatacgcaacgtaatcgagcagcagacgccggacatggtggtgatcgattcgattcagactatgtataacgaagaggtggggtcagcgccaggaagcgtgtcgcaggtcagagagtctacgaatatcttgatgcagctggctaaaggactaggcatatccatctttatcgtaggacatgtaactaaagagggcacggttgcgggccccagggtattggaacatatggtggatacagtgctctactttgagggagaccggcatgcgtcctaccgtattctcagggcggttaagaaccgctttggctcgaccaatgaaataggagtctttgaaatgcagaaaagaggcctcgtggaagtagagaacccttcggaattcatgctgagtggcaggccggaacatgcatccggctccgtagtggcatgtgcaatggaaggaacacgtccgatgctgatggagattcaggcattggtttgcaaaagcagcttcggcatgcccagaaggacggcggcaggcttagactataaccgcgtcaacctgctgatggcagtattggaaaaaagggcaggattgccgctgtccagttatgatgcctacgtaaatattgccggtggcatccggatgaatgagccggcagcggatctgggaattgtgatggctatagcgtccagttataagaataagccggtgtcagaagatgctattgtttttggagaagtaggactgagcggggaagtaagggctgttaccatgccggagcagagggtcgcggaggctaagaaactaggatttaagacctgtattctcccggaagtatcggtgaaagggcttgggcaggttgaaggaatcgaggttataggagtcagatctgtaaaccaggcgatgaatctgttataaaaggagtaggcttgctgtttcgacaaatttcttacaaaatcaagatatggatggaataaattgtgtaaattgtataaataaaataaaaaataaaaataatattgacaacttaaggaagcatatgatattctatcagagttgtcgcagggacataaacaagaaggctagatcagcgagcggcaattattaaaaagattaaaatagttgttgacaagattcgacaaatatgataatctaatatggctgtcgattgagccacattacagtgacaagatgacagcgaaaaataaaataaaaaagttgttgacaaacgacaaaacatatgataatctaatatggctgtcgaaacacgacaacaacctacagaaccttgataattgaacaatagacaacaaccctgaaaatttcttgtaaagagagaatttcagaacagaacgggacatcgagagatgtccgaccttaaaacagtaataacgggaaggaattagccaagagttagttctgaccgcgatcacaacttttaacgagagtttgatcctggctcaggatgaacgctggcggcgtgcctaacacatgcaagtcgaacgaagcgcctggccccgacttcttcggaacgaggagccttgcgactgagtggcggacgggtgagtaacgcgtgggcaacctgccttgcactgggggataacagccagaaatggctgctaataccgcataagaccgaagcgccgcatggcgcggcggccaaagccccggcggtgcaagatgggcccgcgtctgattaggtagttggcggggtaacggcccaccaagccgacgatcagtagccgacctgagagggtgaccggccacattgggactgagacacggcccagactcctacgggaggcagcagtggggaatattgcacaatgggggaaaccctgatgcagcgacgccgcgtgaaggatgaagtatttcggtatgtaaacttctatcagcagggaagaagatgacggtacctgactaagaagccccggctaactacgtgccagcagccgcggtaatacgtagggggcaagcgttatccggatttactgggtgtaaagggagcgtagacggcaatgcaagccagatgtgaaagcccggggctcaaccccgggactgcatttggaactgcgtggctggagtgtcggagaggcaggcggaattcctagtgtagcggtgaaatgcgtagatattaggaggaacaccagtggcgaaggcggcctgctggacgatgactgacgttgaggctcgaaagcgtggggagcaaacaggattagataccctggtagtccacgccgtaaacgatgactactaggtgtcgggtggcaaggccattcggtgccgcagcaaacgcaataagtagtccacctggggagtacgttcgcaagaatgaaactcaaaggaattgacggggacccgcacaagcggtggagcatgtggtttaattcgaagcaacgcgaagaaccttacctgatcttgacatcccgatgccaaagcgcgtaacgcgctctttcttcggaacatcggtgacaggtggtgcatggttgtcgtcagctcgtgtcgtgagatgttgggttaagtcccgcaacgagcgcaacccctatcttcagtagccagcattttggatgggcactctggagagactgccagggagaacctggaggaaggtggggatgacgtcaaatcatcatgccccttatgaccagggctacacacgtgctacaatggcgtaaacaaagggaggcgaacccgcgagggtgggcaaatcccaaaaataacgtctcagttcggattgtagtctgcaactcgactacatgaagctggaatcgctagtaatcgcgaatcagaatgtcgcggtgaatacgttcccgggtcttgtacacaccgcccgtcacaccatgggagtcagtaacgcccgaagccggtgacccaacccgtaagggagggagccgtcgaaggtgggaccgataactggggtgaagtcgtaacaaggtagccgtatcggaaggtgcggctggatcacctcctttctagggaagagaagaagtaagggctgctgtctattgttcagttatcgaggaatgctggagaagccggcttgctgcgtcagaacagcatggcacggatttcctggcggcgatacgcccgggggcaacacccgttcccatcccgaacacgatggttaaggcctgggcggccgatggtactttactggagacggtacgggagagcaggtggctgccaggatttaaaaaaagagaagggcagatgcagatccgctgcagatgttcgggatcagatagataccggcagggacgggcaacaacccgcagagccgaccccatcagcagggcagtgctgttaagatagctggtcttaccagtgattagaggtcagaagcgcattctggtttctaatggctgataaagcgtcagccgcgcatatgtaccttgaaaactgcatacatggaaatacaagaatgatcaagaagaatatctagatcaagacatccgaggtaatcgcggaagcgattattcagaacaaaccagattcgaggcaacgaatagaaaaaatgccgactggccaacgccggcaacgctatgccgacgtaggatcgaagcgccgcccgtgcgcttaagtccgcttggtcatgctagaaagagcatatggtggatgccttggcactaagagccgatgaaagacgcgataagctgcgaaaagcttcggggaggggcaaataccctttgatccggaggtgtctgaatggggaaacccgcatgaggagccctcatgcatccctgcgccaatccataacgcagggaggggaacccggcgaactgaaacatctaagtagccggaggaagagaaaacaacaagtgattccgtaagtagcggcgagcgaacacggaggagcccaaaccggggcgcgtgcgccccggggttcggaccgcggaagtgattcgggaaggctagcagaacggctttgggaaagccggccagagagggtgaaagccccgtaagcgaaagcctgacagacacggcggtatccagagtaccacgagacacgagaaaccttgtgggaagaggcggggaccaccccgcaaggctaaatactccttagtgaccgatagcgcatagtactgtgaaggaacggtgaaaagaaccccgggaggggagtgaaagagaacctgaaaccatatgtttacaagctgtggaagggccttacgtgcccaaccgcgtactttttgtagaacggtccggcgagttacgccggctggcaaggttaagggctaaaggcccggagccgaagggaaaccaagtctgaagagggcgaaggagtcagccggagtagacccgaaaccgggtgatctatccatgtccaggttgaagttgccgtaaaaggcaatggaggaccgaacccacatccgttgaaaagggtggggatgaggtgtggataggggagaaattccaatcgaacccggagatagctggttctcctcgaaatagctttagggctagcctcatacgagtcttgcggaggtagagcactgaatttcctagggggcgtcaaagcttaccgaagaatatcaaactccgaatgccgcgtagatgatgtatgggagtcagactgcacgagataagttgggcagtcgaaagggaaagagcccagacctgcggctaaggccccaaaatgtgtgttaagtggaaaaggatgtgggatttcgaagacaactaggatgttggctcagaagcagccatgcattcaaagagtgcgtaatagctcactagtcgagaggtcccgcgccgaaaatgtccggggctgaaacacactgccgaagcccagggatgtaccaagtacatcggtagaggagcattggatgcgggaggaagcggcaccggaaggagccgtggaccgcatcgaagagagaatgccggaatgagtagcgagaggaaggtgggaatccttccggccgaatatccaaggtttccagagtaaagctgatctgctctgggtaagtcggggcctaaggcgagggcgggagccgtagccgatggacaacaggttgagattcctgtaccgcgatatgacagaactgtggggacacgcgtggaaagcataagccgggaatggaaagaccggcgcaagcggggtaggggctgcataggcaaatccgtgcagcgtaacccgaagccgtgacgcgtaccgaactgcaagtagggaagtatgcgagccatgcgtcaagaaaagccgctatcgctcatatcgcgcccgtaccgcaaaccgacacaggtagatgaggagagaatcctaaggccgacgggagaagcattgtcaaggaactcggcaaaatgactccgtaacttcgggagaaggagtgccatagagatatggccgcagagaattggcccaagcaactgtttagcaaaaacacaggtctatgcgaagccgcaaggcgaggtatatgggctgacgcctgcccggtgctggaaggttaaggggagaggttagagcgatcgaagccttgaacttaagccccagtaaacggcggccgtaactataacggtcctaaggtagcgaaattccttgtcgggtaagttccgacccgcacgaaaggcgtaatgatttgggcactgtctcgacaatgcacccggtgaaattgaagtaccagtgaagatgctggttacccgcgccaggacggaaagaccccatggagctttactccagcttgatactgggatccggtattgcatgtacaggataggtgggaggctaggaagcgatgacgccagtcgccgcggagccgctgttgggataccacccttgcagtgctgggtttctaaccagcagccgtgaaccggctgggggacaatgtcaggcggggagtttgactggggcggtcgcctccgaaagggtatcggaggcgctcaaaggtcctctcagaatggtcggaaaccattcgcagagcgcaaaggcagaagagggcttgactgcgacaccgacgggtggagcaggtacgaaagtaggacttagtgatccggtggtataaagtgggattgccatcgctcaacggataaaagctaccctggggataacaggcttatcactcccaagagttcacatcgacggagtggtttggcacctcgatgtcggctcatcgcatcctggggctgaagtaggtcccaagggttgggctgttcgcccattaaagcggtacgcgagctgggttcagaacgtcgtgagacagttcggtccctatccggcgcgggcgtaggatatttgagaggagctgtccttagtacgagaggaccgggatggactggccgctggtggatctgttgcgcctccaggcgcatggcagagtagccaagccgggacgggataaacgctgaaggcatctaagcgtgaagcccccctcgagatgagatatccctggcgttaagccagtaagaccccttgaagacgacgaggtagataggatagaggtggaagtgcagcaatgcatggagctgactattactaatcggtcgagggcatgaccagagaggctggaaggcagaaaaaagactcggagttggagtttcggatggaagtatttcccgtatgcggttttgaaggtatatatgaaaaggggctatcgggaaatagatagttccaaataggggcagatgtgactcataccaggtcacatctgcccctgaaatttttccataaaagagaaaaagatggctaacgacaaccatctcttctccgttacatgttataatgtaactatgctaaacaataagtattataacgaattttttgaattagggcaacagaaaattaacttcagtttcttcgaattgtgtttacctgacgacgatccagtctataccctgaaaaaagtgatggaggaattagatttttctggcttgttggccaattgttcagataagggaagaaccgggtataacccaattatgatgtatgccgtagttacttacgcaaacatgcgtgggattagagctgttgaccgtattgtggaattatgcgaaagagaccttgcatttatctggcttaccaaaggtcagaaaccaaaaagggatgctttttatgagttcaagaataaaagactgactgcagatgtattggatgagttgaattaccagtttctccgccgcctgcaaaaagaaggactgatcacattgaaatccctttttattgatggaacaaaaatagaggccaatgcaaaccgctatacatttgtgtggagagggacgatcaattatcatctcgcaggcttactcgatatgattgattcactgtatcagaagtataatgcatggatagatgaaaatgagtatggcataaaatatgacattccccatgcacatatgtttgtgatcgaaggaatggataaggtaagagatgtcattgaaaagaaccggaagcgaaaactgacaaaacataaaaagttgtccaataatacgatcatcgagattgacaactgttccccattggagattttgaaacttcagaaaaatctgactcagatcgcagagaaggaacagattgcgtttgtttacggaaaagggaagaggaaatcggagctccagcagctttatgaggaattagaaacctgcggcaaacgccttatgggatacaaagaatgttttgagatcatgggaaaggacaggaacagctattccaaaacagatttagaagccacctttatgagaatgaaagaagatcacatgctgaacggacagttaaaagccgcatataatgttcagatcgcagtagagaattatttcattgtccatgcttatgtaagcaatgaccggacagactataacacactgattccggttttagaaaagcataaaaatgcatttggggagattttggaagaagtaaccgcagatagcggttattgtagcgagaaaaatcttctgtatttaaagaaaaataagatatccagttacatcaagctgcaggatcatgaaaaacggaaaacacgcgcttacagagaagatattggaaaatattacaacatgaaaacacagatatttgaggatgaacggtattatgtttgtcatgacggaagaggattgcatcatatccgcacagagaccaaaaaacagccgggttatacccagacttttgaggtatacggatgtgcagactgtagtggttgtgaacacaaagcgaaatgcttatataaatataacgcagaaaaagatgctgagaaaaacaaagttatgaagatcaatgaacaatgggaaacattgaaagaggaatcccatgcaaacatccaaagtgagaaagggattctaaatcgtcagatccgttccatccagacagaaggacattttggagatatcaagggaaatgatagtttccgaagattcaactaccgaacgtcagagaaggtgtataaagaattcatgctgtatgccattggtcggaacatgaataaatatcatcgttttcttcatgaagagattaaaaaattcgaaggaaaaaccgaggaaaagacggcttaaaaaatgtgcatgttcaaaaatgcagttatgggtgttttgcgccctaaaatatatacagaaaaagaacaataagaatctcccacagaatatcaagtatgaaaaacactgatttttatgggagattcttattttaggatttagagtttaaaaatcggtattaaccgacatccccttttttgctatttaaaatctttttcaaattcatccaatgcagccacaaggagggctgaggaatatgccattgtcggaccacctccaaaagccgtggcaaccgttgccgcttcaaggatttcctgtctcgtgcaccctgcttttaaagcattgtacgcatgtcctacaatgcaatactcgcatctggaatatacggatatagcgatacagattaattctttgttctttgaggaaatgctcccttcggaaagcgcggctccgatgaagcctgataaggagccgaatgcttctggattagagtcgcctaaggccttcataccgtaattggaatcttctaatattgctctgacatctttcataatataaatatcctcctgtcttttctatataacagtataatgaaagatggaagtttttgtccaattgatatataaaaagagagaagagagatataggagccatctatagcaagttcaatatttaagaaatatagtaatatatggtataatatttgtaactatctgagggaatgaaaggtattatacatgagggaagagaatcacaagaaagatgcacggctaattgatctggcaggatcaaaggggaagaacatctgaaacactggctgaaaagagtaatgataaattgcggcaagaagcagtttgaaaacgcatatcggaagcgacttgaggattatatggcgaacgcgggcgagtatgagttcgtgttctttaagaacgactcaggcttatcagtgattattccgatgagaatttccagatgtatatctggaaagatgctgatccggagaaatactataacagttgtatgatagaatttgatacgccgactgaaaaagtatatgagatgcagacgcagaggcagtgctatgagtaggcgctgccagcaagaataaaacagaataaggagcacgcggcaagattgccgcgcgcttcttattcgttgccttaagattcctgcctaagtgctaagatatgattgataagcagcgtagcaatatcatccttgctcatcagttccagttcggttacgcaatccggagtgatcatggtgacaatattggtgtcggtctcaaatccagcccccttcaccttcagattattggcaatgatcatatccagattcttcttcaccagtttcttcttggaattctccagcatattttcggtttccatagagaatccacaaaggaactggccgggctttttgttatcacccagaaatttcagaatatcgtccgtgcgctccagagggatgctaagttcagcatccgatttcttgaccttttcatctgaaacctgggatggacggtaatcggcaacggcagcagccttgatgatgatgtccatatcccggcttctggaagtgacggcatcaaacatgtctctggcagaagtgacaggaatcacatcgacgaacatcggcggctctatagcggtttttccggttaccagcgtaacctgcgccccccttagcatacagtccctcgcaatgctgtatcccatctttcccgaagagtggttggtaatgtacctgaccggatcaatggcttcccgggtaggtcctgcggtaacgagaacctttaagcccaacatatctttggggcaggcacagcatctgtaaatgtgctggaggatgaattcaggctccggcatcttcccggctccggtatccccgcatgccagccttccgctggcaggatctatgatttccataccgtactttctcaacgcttccaggttgttctgggtcaccgcattctcatacattgccgtattcatcgccggcacgatgatcttaggacatctgcaggccaggaaggtagtcgtcagcatgtcatcagccatgccatgagcaatcttggcaatcacattggcggttgccggggcgattacggcaacgtccgccttctgggcaagagcaacatgttcgacatggaattcgaaattcctgtcaaatgtgtcgatcacgcaacggttgccagtgagcgtctcaaaagtaatcggcgtaataaagtttgtggcatgctcggtcataagcacatggacctcggccccggatttgaccagcatgctggccaggctggcgcttttatatgcggcaattcctccggtaacgcccaggaggatcgtttttccttttaacatagtatgtttcctttctgtatgattttcatattactataactataacctgttttgggacgtgttgcaagaagtcctgtgtgaaaaggacgggtgaataaatatgtacgtcagctatatgtggaaaagagttgcttaatattgacccgggtgttataattacaacgtaattgtattgtatcctgcacagcaggaatgataacaaggaggaattgaataatgaagacaaagaaacacgacacacgttggatggtcagtgttgcacttatggcagcgattgtcatcgtgctggcgaacacgccgctggggatgattcaactgccgattattaaggcgacaactgtacacattccggtaattatcggagcgattctgttaggcccatcagccggagcaatcctgggcgccgtatttggcgtatgctcattgatcagcaatacgatggcgccaacgcttttatcctttgcattctctccattcatgagtactacagggataccgggagcactaaaggcaatctggatttcagtaggatgcaggatcttgattggagtagcggcaggatggctatggattttactgagcaagctgaaggtaggccagttgatagcgcttccaatcgtaggattcatcgggtcaatggtgaatacggtggcggttatgggaagcatttacctgctattcgcccaggagtatgcgcaggccagggaagttggcgtaaccgcggtatggggcctgattatgggaacggtgactgcatcaggaataccggaggcaatcgcggcggcagtgctggtactggcattaggcaaagtactgattcaggtatttaagaagatgaatataagaatgatgaacacccaactagccaagtaagaagttaatataaaaaaataaggggctgtcggtttatgatatgctcccttctaggtagacaagtgaaataataaaaacttgtcacttaggagggagcatactttatgtcaaagaagacgatatctgctaaagataaaatatctgcggttatgctatattttgagggaaatgtttcccagcatcaattggcagaacggttagaggtgagtcttgctactgtccaacaatggattcgtaattatgaatctatgggggaagatgcatttctaatgaaacattataaacgatattcaaaagaactgaaactccaagcggtgcaggaatattttatagacgtaaatgataaacgagtgctgcggatatgtcgtaaaaaagatatcaaatcaactataaaatactcaaataatggttgtacaggacaagctgctaatccacagtatattgccgaaaacatcctaaatagagagttcacagctgatatgccaaatgagaaatggcttactgacgtcacggaatttaaatattatgtcggacccgtagtacacaaaatatacttgagcgctatattagatctatatgaaaaatccgaatgcacatccactttgccatagtgataggggatatcaatatacaaaccgatcatttcataataaactagaaaaagcaggcatgacacaaagtatgtctcgtgtaggtaaatgcatcgataacggtcctatggaaggattttggggcattctcaaacgagaaagatattatggtaaacgttttactgataaagaaacacttgtaaaaatgattgaagattatatagattactataacaacaaacgcttgcaaagaaatcttggagttttaactccaatggaaaaacatgaaatctacttgcaagccgcatgaaaaactgccagcagataatctactggcagaaaaaatcttatattttttcatttgtctacttgacgggagcagttcagttcccgacagccccccttttaattaaactgcaagcttcaaaatttctataaattcttttacatgcagtggtacataatgtcctaccggagcggtgtcattatgtgtagctctgtctgccatttctttgaagtgtgtatcgtcgattcccatttctgtgagagaagtcttcagattcagtgactggaagaattcttttaatttgtcggctaagatgtaagccatttctttttctgtgtagttgtatggatctatatcgaagacacgttttgcaagttgagcaagtttgtaaggttttacttctgccatgtatttgcaccatgctacaagaacaactgccattccttcgccgtgagtgatgccatactgagcgctgatttcatgctcgattctgtgtgaaccccagtcagcggcacgtccggtatcaaggattccgttgtgtgcaacggatgcaagccactgaatctcagcacgtgcatcgtagtttgccgggtctttcatcagacgttttgcattgatgattgctgcctgaatggcaccttcgatcatataatcagttgtatctgtgtgagcaacgtcagagaaatatctctctaacaggtgggaaaggatatcagcgcatccgcaggatgtctgatatgccggaagccccatggtatatttcgggttcatgattgcaaatttcgggatgatcatgtcatcttcgaatcctaatttcatcagtccgttggaaacgatcgctgcattagatgtctcagaaccacttgccggaagtgttgtgattgctccaatcggaactgctgtttcaggagtggcggatccatcaaagaaatcccatacatctccatcataaggaataccaagtgcgatagattttgctgtgtctacagaacttccgccgccggcagcgagtacgaagtctgttttatgttctttacatacttttacaagatcacggatcagttcgatcttcgggtttggaacaacttctccacattcctggaaatcaattccaagacggtcacaagcatctttgataacatcccagataccaagtgttttaatgaaatctccactgtatacgaacatcagagaagttactttgtattcttttaaaagatcatacatattattttcagctccgtcaccgaagaagatgcgagccgggtttctatagtgaaagtttaacatttgtattgcctcctaagggttttatacctgattaatagtatttagcaataacaaatgggaatgttgcactgctgcaatttatcttcccatacatcgggcagacgtttatctgtgatgatcatatcaatatccttcaaatctgtaatcttatattccgcagtatctgaaaactttgtatggtcagcgaccagataatgtttacgtgattgagagatgaaagcctttcttacctggctttcgctcatattgttgtcgagcagaccgtgagttaagtcgatggctgagttgctgatgaagcacttatctgcaatgtaataggatatcgcatcggtggtctgatatcctgtaaatgaattggaacgttgacggaatgtgccgccaagtgaaataagcttcaggttagaagactgattgctaaataaattaataatacgaagagagttggtgataatgatcatcttctgattcctttgcacaagttctttggccagtgttaggcaagtcgtgctgcaatcaaggaaaatagtatcgccttctttgatgaagcgattgattgcgcaggcggccagtctctctttttcttgtgagaaaaaagtctcacgtaactgtacaggtgcacctttgtcatccgcatccggaaggaatgctccgccgtggattctttttaatttgttctgtgattccatctcttttaaatctcttcgaatggtttcttcactgcaattaagcttttgactcattgtggaaattaagatgcttccatacgtatgaagctcttcttccaaatgtttttgtctgtcaatctttaacataactcataaatcctttcaacacatttatagaaaaaatgcataactatattgaacgcagttatataataccaaaaaatccctcatttttcaacactaaagaataaaaaacagtcaaatgttgtgaaaatgacggtaaaagtcaagaaaaagccaaagaaagtaaaaaaaataaacaaaaatattgttgacaaatgtgtataaatgttgtaatttgttgctatagcaaaataactgaaggagggtaaacttaataaaatgtgattttgaggggaatttaggaaaaatgacattttatgttgaatgcaggaactaagcaacaagacacaatattaattacaagcggacgttattataatgaaacaaggaacattgaccacagaccacaagatgattcaaagtttcattaaaaagaaaaataaaaatgtaacgttaaaaaggtatgtaagaaaggaagagtaaaatggaaaacgctaacaacaagaaaggaagctttatggggttattacctctggtaattttcctggtagtttattttgcaatgggtattggaactggagatttctctaacttcccattaatgatcggtattttcttggcatccgctatttcattatttatgaagagcccggtagctgagaaaaagacattcacagaaaaagttgttatgttctgtaaaggtggtggagatgacacattgatcctgatggtaatcatctacatgctggccggagcattctacggagtagcaagcggaatgcacgcaacagatacagtaacaaacatcggtatttcaatcctgccggcaaacatgatccttccgggattattcttaatcggttgtgttttaagtttctcaatgggaacatcaatgggtactgtagcagccctgatgccaatcgcaattgacatcgcatctaaaacaggcgtaagcgtagcatttgtaagtggtgttgtagtaggtggagcaatgttcggtgataacctttcattcatttctgatacaacaatcgcagcaacaacaacacagggaatcggaaacaaagaaaaattcaaagcaaacattttcatggttggaccagcagtgctcattacagtagtagcacttgctctgtatccaatcgatgcaactaagatttctacaggtggatctatcaaccttgtaaacttagttccttacattttaattatcgcattatctcttgcaggtatgcatgcagtaatggccatgacaatttctgttatttcaggaatgatcatcggagttatccacggagacttctcgtttgtaaaatcattcacagttgtacatgatggtatgacaagtatgcaggacatggcagttatcgctatcttcgtaggtggtcttgtagcaatcatgcagtacttaggtgggattgactggttactgaacaaactggctaaaggaatgaaatctaaagtcggtgcagaacttagtatcgcagcgcttgtaagtttagtagacgtagcaacaacaaacaacacaatttctatcatcgcagttggaccgatcgcaaaagatatctcagaagagtttgacatcgctccggcaagaacagctagtattcttgacctgttctcatctgcattcaatggtttaacaccatatgcaggacagcttctgacggctggtgcaatggctaagattgctccggtagctattatgccatatgtatggtatgacatccttatgatcatcttcggtgtaatcttcattgtaatcggacggccgaaattcaaagaaaaagctgcaaaagcttcaaactaagagcggaaataaaagacagaaattaaatgttagaaagcaggaatttgaaaatggataaatattcaaggcattttttgctgaacgttgatacagcaaaagaatatgcaaaagaaaaagttggatattttaaagatgatgaaacattagaggcaatcgagatcggtgatggtaacatcaactacgtatttaaagtttggaatccggagacaggtaaatccctgatcatcaaacaggcagatacagttcttcgctcttcaggaagaccgcttgatatgcatcgtaataaaattgaagcagagatccttggcattgaaggaaaattatctgagggatatgttccggagatttatctttatgacgagaatatgtatgcattatctatggaagatatttccgcatacaagaaccttcgtacagagatggaagcaggaaaggctttcccgaaacttgcagatgatattgcaactttcatggcggacacactgcttccgacaaccgatctgattctggacagagccgagaaaaaggaaaaagtaaaattatttaccaacccggaactctgcgatatttcagaagatctggtatttacagagccatattatgattataaaggacgtaacatcatcctggatcagaacatggattttgtaaaagaaaggctctatggagaccaggaactgcatgcagaagtaggacagcttcgcgatgactttatgaatcatgcacaggcattgatccacggagacttacattctggttctattttcgtaaataaggaaggaacaaaagtcattgatccggaattcgcattctacggaccaatgggttacgatatcggtaacgtaatcggaaatctgttctttgcctgggcaaacaaatattatacagattctgaaaatacagaattcctgacatggattgagagcacaatcggagaagttacagataaattcaaagagaagttctcagcaaaatgggatgcgcttgttgaattcccactgtataagacagaaggattcaaaaaatattatacagataaagtaatggcagattctttcggatatgccggtacagaaatcatccgtcgtgttgtaggagattctaaagtaaaagaagttacttctgttacaaatgtagatcttcgtataccgatggaaagaactttgatccagatcggtatcaaactgatcaaggaaagaagaactctgaaagacggagcagcaatcaaagctgttggtaaagagtatttaaaataagtaaataaaatcactttccggaccggttaaacgttccggaaggtatctattagaaaaggaagatgtatgatgaaaagatgtgatcaggatttggctttcatgcttcagtatgaaaatgtagcatggtatgaaaatggaaaagtaagaatattagaccgtagaatttatccgacagaggttaaatttgttgagtgcacaacctataaagaagttgcacaggcaatcacagatatggttacacagagtgcaggaccgtataccgcagccggcatgggaatggcactggcagcacatgaggtagaaggtaagatagaagaagaacagatcaagttcttaacacaggcttcttatgatatctcacatgcaagaccgacgacagcaaatcgtatgggaattattacagaaggttgtctgaaagttgcgaaagaagcattggcggaaggaaagagtgcagtagaggcatgtttcaacagaaccgttgattctttgaacagaagatatacaacaatgggaaaagtcggagagaatctggcagctttgttcccaaagaacggaaccatccttacacagtgctttggagaaacaatcatcggtatgatgctccgtgcagcaagaaagaacaacaatgatgtaaaaattttctgtgcagagacaagaccatacttgcagggcgcaagactgacatctacatgctgtgcgcagatgggatttgatacaacggttattacagataatatggtagcttattctatgcagcataagggcatcgatctctttacttcagcagcagacaccattgcaagagacggccatattgcaaataagatcggaaccttccagatttccattttagcaaaatatttcggaattcaatattatgtaacaggaatcccagataaagataagatgtatggaaaagatatcgttattgaagaaagaaatcctgcacaggtactttcttaccgaggtatcccgaatacaattccggaggtcaaaggaatctatccatcatttgatatagtaccgccacatttgatcagtggtgttgtaacagataaaggtgtttacgtaccatatctgttaaatgattacttcaagggtgaagtaaaagatttctattaaaataatgttataaaagaggtatgagcaatggttacatgtatgaataaagaaagaaaatatggttctgtcatttccaacggaaaagtctcggtagattgtgataatccaggttacaggtgttccggaggaagtatccaaagatatagcgcagagagcctacgatgattgtcttgtaaaaagtaatctttccaaggaacttgtattcgaaccacttggggagtagacttagtaggaaataaaaacgacagcgaacaggacaaaagtaaaaaggagagaatgaaaaaatgaagttattaatcagagcaccttttattgaaagtgaaagaaagagactggaagcttattttgatgagatcgtatatgctccatggacaactaccggtgaacgttattatgaagatgagatgctggaagttctgaaaaaagaacagccggatgctctcattacagaacttgaccgtgtaacagaaaaagtattgaacggatatgacaaactgatcttcatcggagattgtcgtgcaaatccggcaaacatcgatgtggaagcatgcaagaaagcaaatgtacctgttctttgcacgccggcaagaaatgcgcaggctgtagcagagatgctgtcaggacttcttgtaagttatatgcgtaatctggttccggcagtacagtggatcaaagatggcaaatgggtagaaggaacgacaccttactatacatggatgggaaatgagctttgcggaaagaaagtcggattcgttggttttggcgcagtcggaaaacatgctgcaaagattctggaagcatatggatgtgagatttcattctatgatccatttgtagattttgtaaaagacagttacaagaaatgtgaactggaagaaatctttgaaaattcagatattgtatccattcatcttccggtacttgacagtacaaaaggaatgatcaatgcagagttatttgcaagaatgaaagaaacagctattttcgtaaatacagcaagaagtgcggttgtggataaacctgctttgatggaagcattaaagactaagaaaatccgtggagcaatcctggatgtattggaagtagagcctccgacagaagaagcactggaaatcgcaagactggacaatgtacttttgacaccacatatctgtggagcaacttatgaagtaaccgatcatcagtccagaattatgacagaccgtatcgatgcatggatgaaagagaacaaataaggagaaaagcagatggaaacaaattatctggttgtagacatgggaaccggaaattccagagtgggacttgtcagtgccgatggaaccatctggggaattcgaaattacgagaatcaatattataaagataaacagtatgaagatgcacagtattttctcccggaagaatgggaaaacaatctcttaggcggctgtaaagagctgcttaaggaattcccggaacatccggtgcgtgcgattacttcatccggagccagagaaagtattgtcctttataataaagtaggaaaagcttatcttggccttccgaatattgataatagaggccgtgcatggatggcagaaatcgaagaccgtacattcatctatgaaaagacaggccgttgggtaaccgaagatttcccggcagcaaaactgatgggataccggaaaaagtatccggaagagttcgcaggcattgcaaaaatcacaagtttgagtgagtggatcggtgaaatgtttaccggtaaactggttatcgagccgtcacaggcatgtgagacacagttctttgatattgagtcaaaagaatggtcagaaagactttgtggagattatggaatttccatggatattctgccggagatcgcaaaagccggggatagccttggcaagattaaaaaagaaatggcagatgagctaggaatcagtgaagatgcagaatttattgtcggcggagctgatacacagatcgcattaaagagtgttgggatgggtgtaggagatgttgcggttgtatccggaacgacttcaccggttgctacgattaccgattataaatattacgacaaacaagaacgttgctggacagactccaaccttggaggggaaacctatcaggttgagaccaacccgggtgttacaggattaaactaccagaagatgaaggcatttttattcccggatgcctcttatgaggaaatggaagaagagatggcaaaacagacagagtatttatgtacggcatctttttcatccttatatttctcagagaaacgatctctgaaaaaaggtggatttgtgatgaaagcaccatttgaaacaacaatgaaaccaatccatctgatctgggcggtggtagccgatattgcatgttccatctatgtacagtacagaagcctgtgcgagatgaccggacatgaaaaagattatattttaggatgcgcgggtggatttcagtcgaagatgctatgccagcatctggcagatctgacaggaaagaaactggtcatcagagaaggtttcagccaggcatccatcaatggctgtttgagaatctgtaatgcatattacggaattgattcagaaacagaatcggagcaggcagcaacaatttatacaccaaaagaagacagcctgattcaggagtattataaagaatggttgaaaaaccgtgagatgttaaatccttaaaggggagttagcatagattatgaaaaagcaatatgaaattaagtaagaaagagggaaaaaacaatgttaatgcaagaagaaagagaacagattgtagcatatggtaaaaagatgagcgctgacagattgacatctggaacaagcggaaacatcagtatttataatgcagagaaaggtctgatggcaatcagcccatcaggaatcggatatttcgatgtaaaaccggaagatgtagttatcatggacctggaagcaaacatcgtagatggagacaagaaaccatccagtgaatgggcccttcatacagcaatgtacaaaacaaaaccggagtgcagagccgttgttcatacacactctatgtactgcacagtatttgcaacacttcgtcagccactgagagctgcacactatgtaatcgcagatgctggtgtagatgaagtaccatgtgctccatattgcacatatggaacacacgaacttgcagaagctgcttctaagacaatcggtgacagcaacgcagtactgcttgctaaccacggtatgcttgcttgcggcggaaacttaaagagcgcatactctctggcatgcggaatggaattctgtgctgagttagagtatcgtacaaagacaatcggtggtcctgtatatctgtcaaaagaagaaatggcagaagtactggaaagcttcaagagctatgggcagccgaaaaagaaaaactaatttatccgacaattcacatataatatagcaataaccccccattcccttaatagagcggtctcggaaactcttaaagcccgaatttccgctcttttttggttccttcttttttctcttcctccatatctcaggcaagcgttacattacattcttgcgtttaatgaggatgaggaaaaatatatagggttgaaagaagccatgtacttaggttatgaagtggcatgttactttcaaagatggcaggttgtatatgattaaaactatgtgagaaatagggtattttactattatttgtaatccttgcccgaagaaacaaacacaatggagttatcctccaattttgacagaaaattaatctggattaacaaagatttaaccagggaaataggaaagattttacaagaatcatttaaagtacataatgtaggaaatcattcaaaaaaaatgaaatgaaagaaacacaacaagacaggagggggttatggcctacgaatatttatggtttgatttagggatgacactggttgaaacatccaggagtattcgctatcagaaagttctggaagattttcagatagtaaaggaagagaaggaaattcggaaagcatatcacataacagataagatttttatgagagagtacccacatgttctgggacaaagtccggagaagtttttcccgtggtatcttggcgtgttgaattatgaactgaatatcagaatatctattccggaagtttatgaggcacttatggaaaagaaaacaaatgagagtcagcagtggaagtgcatccagggtgtaaaggaaacgttggaaagactaaaagagcagggaatgaaattggggttgatcagtaattgggactccacgtgcagggaggtgctaaaaaataatggattggatcagttactggatacaattgtgatttcttcagaaatagaaatagaaaaaccggatgtgaagatttttgagtatgcactgagtatttctggagcagacaggaaattatcgttgtacattggagataattattatgacgacgccataggctctgcaaaggcaggcatagattgtatcctggtgaatccttatgggacgctggggatggaagaaatcaaaaatattgagattattccaagtgtggcagaattggaatcagttttagggggtgtttcagtttaacagcatggaagttgaatttaaggaaaagagtttgtgcgaaagaattgatctggtatatgagaagttgacagaagcacaaaaacaaattgcgatttatttaaaaaagaaatgggaacaggcatgtctgatgtcagcaaagagtctgagcgaacaggttgatgtaagtgaggcaacagtacatcgtctggcggcaagtctggggtatgacagttttacagatatgaaagaaaagatgaaagaggaactgctgatgaaccgggcggtcaccaatatgagttttcggaatcgcggaatttcagaaaactggctggatgaatgtttgcagacagagatggtcaatcttgtaaatacttatcagcttaacctaaaggataagatttcacagggagcagaaatgctgcgaaattcaagaagaatttacgtgatcggtgataagcagggactggggacttcttcatatttgggatttgtattaaattatcttctgggcaatacagttcatctgaccctggccgatgtttatgaacagattggatttatgggatctgaagacgtattgattgtgattggatttcaaagatattgtccaaggactcaaaaggcagtggagcttgccgcagatagaaatgtgagaattctggcttttacagattgtaatctgtcaccttttgctcaaaaggcagaaatatccctatatgcaacgatggactctacctatttcttggattcttatactgcagttgtttccattgcacaggcactgattgcaaggatcgtcatgaaagacgaggaaagaatccgaaagaatgtagaggctaccgaatatgtttacaggagattccgggaataagcagaggaaggatgagaagatgaaaatcacgataatcggatgccagggcgcttatccggaccaaaatcaggcaacatccgggtatttgatcgaaaccgagaatgtccgtgtacttttagattgtggatgcggagtgatttcccagatacagaattatattttactggaagaactggatgcagtagtaatcacacattatcatccagatcactgttcggatctgggatgtttacaatatgcatctatgattctgatgcagtttggaaaacgaaagaaacctttggcggtatggggaccgggagaaaatgaacggttatcttatggagaatactgtacaggaaacagttatttggaagaagatgtttttcagattggagacttggtatttgccagtcagaaaaatgtgcatgatatcctgtcttatgctattcgtgtagaggatagaaaggggagttctcttgtatattccggggatacaggatattatgaagacctttcgaagtttgcggaaggcacggaactatttttatgtgaatgttctttgtacaactggcagaaagggaagactccaggacatatgtgtgcagaggaaacgggaatggccgcgaaaaatgcaaaggcaaaaaaactttgccttacgcatttgccgccatatggaaaccgacagcaattattggaagaagtaggtcataaatatcagggggaactggtattagccagttctggtatgatatttagacaataaagaaacatgcttcagagaagagtaaggagaaaagtaaaaaatgaaatcaaaattaattttcaggatcttaacagcaacgatggcaggagtaatgatggtaactgcggcagggtgcgcttcgggaaatcaggataaaggaacaacagaagagtctattgtaagaatggctgtcagttcagagccggataatctaaatccgatgaaatcttctgcaacagatacatcggctatgatgatgaatgtgtatgaaggactgctctcttttgataagaatggaagttttattccagctctggcagaaagttatgaaatcacagatgacggaatgacttatgaatttcagttaaaagaagggattcaattccatagtggagatgaatttaacgcagaagatgtaaaatatacatatgaaacattagccggattaaatggagaatcccctttaaatgagacactggcaagtgaactggtggcggttgaaaccccggatgattatagcgtgcagttaaaattgaacaaggtagatgctggttttctttctaaatgtacgatttcaatccagcaggatggatatacacaggacagcacaaatccgaatggaacaggtccatacaagtttaaagaatatgtacagggacagaagcttgttctggaaaagaacgagaactataaaacgattgagacaagaatgccggaaattgacactgtagaatttaaaatcatgacagacagcaatgcggttttgatggcattaaaatcaggagatttggatatcgcatccgtagatgcaagaaacttttcttctttagggaaagactttacatcggtagaaggacctcaaaatatggtgcagatctttgcattgaataacagtgtagaacctctgaataaaaaagaagtgcgtcaggcaattaattatgcggtgaataaagaggagattatccagacagtcatggaaggacacggaacacagttggaaagttttctgagtccaagtatgaagaattactataatgatgatattaagggatatgatacaaacattggaaaggcaaaagaacttcttgcagaagctggttatccaactggatttacaatgacgcttacagttccatccaactatcagacacacatagacacagcgcagattttaaaaagtcagttggaaaaaattggggttacagtagaaatccagcttgtagaatgggcacaatggttggaaaacgtttataataatgcacaatatgaatctacagtaattggacatagtggaaagctggatccacaggattttctgaaccgttttacaacaacatatgaaaaaaattacttcaaatactctaatgaggaatacgatgctaaaattgcagaagccgcatctgtaacagatgaaacaaaaagagcggaaatatacaaagaatgtcagcagaagttagcagatgatgccgcaagcgtatttattcaggatccaagcatcaactatgcagttcgtaatacaatcacgggaatgcagatctatccggtcacgttctttgatatgggaagccttcgcatggcagagtagacaggagggaagggttttgatatatgcagtgagaaaagcgggaacatttgtgataacgctggtgctagtatctatcttaactttcggtgtgtttcaaattcttccgggagatccggtagatatcatactaggcgtggaagcagatccaatgcaggcagcagctctgacaaaggagctgggtttggataagcccataatggagcgatattttgattgggtatttggtgcggtcaggggagatcttggaaattccatacgatatcaggtgccggtgggagacttactgaaaagcagtctgccagtcacggtatcattggccgtactttccattctgttgacaatattgatttctgtaccggcagcagtttttctggcaaaaaatcatcggaaaaactctgcgatggtattgtcttcggtaacacagtttgggattgcggttccatcattctggattggtattttattgattatgctttttgcagtgcagtttcatattcttccatccggagattacacaccattttcagaaaatccaatagaatggctgaaatccctgattcttcctgcatgctcaattgcggttggaacaacagcaacaattatccgatatttaaaaaataccattttagaccaaatgggatttgactatgtacgtacagcgagaagtaaagggatgacacaaaaacaggtattgtttaagcatgtgttgaaaaatgcattacttccggcaatcaccatcctgggaatgatgattgtggatgttctaggcgggagtgtgattgtggaaaatgtatttaatcttccgggaatcggacatttgttgacatcaggagtggggaacagggattttccattggtgcaggggcttgtattttatttggccattacagttttagtgattaatcttttggtggattttttatatacagttgttgatccaagaataagggtaggtgggtgagaaaaaatatgaaaagaaaatacataagaaataaaaatttttgtatcggcctgggaattgtggtgtttttatttgtgatgatgtttatcagcctgttttatacaccatatcctccagatgcaatggatactgccaatgcatttgcagttccatcagcaaaacacctgctcggaacagataattttgggagagatattttgagtcgcttgatgacaggatcacagactgcattttttgttggaataggagcggtcacgattggattgagtgccggactcttactgggttctgtttccggatattttggaggatggattgatgaaattgtaatgcgtttaatggatacgaagatggcatttccaggagtaattctggcattagttctgattacggtatttggaagtggtgcattgaatactgctatagctctgggaattatgtctattccaaaattttgtagagttacgagaagtggatttatgcagatcaaacagttggaatatatcaaagcggcaagatcaagaggggcatcgcgcttcagaattatggtactacatattcttcctaatatttcatcatcgttaattgttactgcaacattgggattctccggagcagtattatcagaagcaggacttagttacctaggacttgggattcagccgcctacagcgagttggggaaagatgctatatgaagcacaggcatatttaataacaaaccccttcttagcagttgttcccggaatcatgattactattatggtattgggctttaatctgcttggggatggactgcgtgatcttacggaaagacaggggaactaagaaaggaaagaaaagagatgacggagtgcaaagagcatataagactggctgtaaaaaatctatctgtagaaattcgtactggagggaaggattgtaaagtattgaaccagataagttttacagcgaaaccgggagaaatcatcgggctggtaggagaatccggatgtggaaaaagtatgacttctctggccattatgggacttcttccatctggtgcatgtgtttccgaaggggaaatccaaatggaagggaaagacctgttatctttgagtgaagcagaactatgctcagtcagaggcggagaagttgcaatgatttttcaggagccaatgagtgcattaaacccgttaattccggtaggaaaacagatcgaagaatgctatcggcttcatcataaagctgtatcagccatacagaccagggaaattacgctggatatgatgcgaacggtaggattgtcccgtgtggagagtttgtatcatgaatttccacatcagttatcaggaggaatgaagcagagaattgtgatcgctatggcattgatcaatcgtcctcggttgattattgcggatgagccaacaacagcattggatgtgacaattcaggcacaaattctggaactgttgaaaaaaatgaatgtggaatatggatgtacagttctgtttatctcccatgatctgggtgtgattcgaactgtctgtgatcagattgttgtcatgtatgccggaaggattgtagagcagggcaaaacggaggaagttttaaaaacacccggacatccttatacgagggggcttctttcttctattgcgggagcgaagaataaaggggaggaactgtacagtattccagggtatgtggagcctttggaaaaaagggaagagaacagatgtccttttgtgaaaagatgcgaacgagcacaggaggtctgccatattacctgtccggatatgaaggaaatacagggcagaaaggtaagatgtttctacgaaggagatggaagaagtgagtaatgtagaagtgctgatcgaagcaagagatctttgtaaatattatcctgtaaaggcaaagaaaatttttgagaagaataaaaaagtacgggctgtggagaaattaaatttgtccatcagaaaaggaagtacttttggtctggtaggagaatccggatgtgggaaatctacaacgggacaaatgctttctgaaatcgtttcggcaacacagggagagattttatatcaggacaaaccactccgtgaaatgaaccgtatggaaagagccgctgtaagaaaaaaaatccagatggtatttcaggatccatattcttccttaaatcccaaaagaacgattgaatggactttggaagagccattgaaaagttgtaccaaattaggaaaaaaggaaaggaaacaaaaggtacaggaaatattgaaaattgttggcctggatgaaagttatgggcagcgttaccccggggaattaagcggaggacaaagacaaagagtcagcattgctgcagctttgatcctggatccggaatttgtaatagcagatgaatcggtttccgctctggatgtatctgtacaggcacagatcctgaaccttttacagaaactgcaaaaagagaagggattgacctatttgttcatttcccatgatttgaatgtagtacagtatatgagtgatgagattggggtgatgtatctggggcatctggtagaactgggagatgcacaggaagtatgtagtcatccggcgcatccgtatacaaaagcactgctttctgcaattccggaagtagaaggagtacgaaaagaaagaattgtactggaaggtgaagttccaagccctgcaaatgttcccgaaggatgtccatttcataccagatgcaaagaggcacaggaacggtgcagaaaagaatatccagctccaagaaaagtaaaggaagggcatgttgtgtgctgtcacaatgtagcaaaggtgtaaaacagacatgaaattaggtgtaatttcagatattcatttagatgttaacgaacaatatccagtagtagaattattggcaaaagaagcagaaagaagaaagctggaaggattgctcctggcaggagatatttccaatggtccaaagagcacgcttcgacacctggaacaaatgaaaaaaaggcttccggtaccattctggttcgtacccggcaatcatgacatgtgggaccaggaacaggagtatatggactcatggcaaatatatgaagaatataaaaaatatgaggagtgcctgtgtggaaaatcagtacaggttggaaacagtattctgctgggaaatattggatggtatgattattcatttggagatgaagcttattcaatagaagatttccagaaaaaaagccgcaatggtcgtgtatggcaggatagtatttgggtccggtggaatcgtgatgacagacaacttgcaaaagcaatgtgtgaagaactggaagagatcataaaagaacacaaaggaaaaaggacgatctccgttacgcacatgatagcgcttccggagttgaaagtacctttggaacgagtgaactgggactattttaatgcatttctgggcagcagagaattgggagagatgtatgaaagaaatggtgtgtcatgcgcagtgatgggacatgtacactatagaaagcgtatactgaaaaatcaggtggattatgtctgtgcctgcttaaattaccatacagaatggcaaacgcaggatccgggagaggaactcagaaaaacgatgcaggagatagaggcataaagaatagaaagaagcatgaaaggatattaagaataatccgtgttaatctgcttgtgattttgaaagaacattcgtatatctatttaacaatatagtattatttttaacgtgcatttctatatagatttgcacgttttcttttctctcaaaaaactctatataaacactatagaacacttgacaacagtttaaaactgttatatactgttttgagaaaaaggaggaaggatataaagaatgaaaattataatcaatacttccttaatggttcctatctatgagcagattgtagaccagattaaaatgctcatacgcaatggggaattaaaggaaaatgacaatcttccatctgtccgtgccttggctaaagaattaaaaataagtgctttaacagttaagaaagcatacgataatttggaaagcgagggctttactgtaacagtacatggtaaaggaacatatgtagcggctacaaatacagaacttcttctggaagaacaaaaaaaggagctggaagcggatttagagcaggctattcaaaaaggcagacgttgcggtatttgtgatgaagatataaaaagtttatttgagttaatattggaggggtgatatatgttaaaaatcgaacatttaaaaaagcattatactaatttttctcttgattgttcattagaacttttgtctggctgcgtgactggtctaatcggacaaaatggagcaggaaaaagcacgacatttaaagcaatattgggattgatttcaactgacggtggaaacattgcaatacttggaaaagatataaaagattttacggcaaaagataaagaagaattgggcgttgtattgtctgactctggttttagcggttatctgaaaataaaagatattatccctgtattgcagaatatgtatacaaaattcgataagtctttctttattgaacaggtacagaaatttcaattacctcttgataagcagataaaagatttctccactggaatgaaagcaaaactaaaagtgctagttgccatttcacacaacgcaaaactgctaatactagatgaaccgacatctggtttagatgtaattgcaagggatgaattgcttgaaatgttgagagaatttatggaaaaagatgaagaacgctctattttgattagttctcatatttccagtgatttagagtcgctgtgcgacaatatctatatgatacatgatggtaaaatcattctgcatgaagatacggacgtacttcttagtgattatgctttgttaaaagtggacgcaaaacagtatgacaagttggataaacagtttatcttacgttccagaaaggaagcatatggatatagttgtttgacaaaccagaaacagtattatatggagaattatcctaaaatcgcgattgaaaaaggcacaatagacgaagtcattactatgatgataagggggagcgaacaatgaaaggattattagtaaaagattttaaattgatgatgttgcagagaaacttctttttgctcattttagtgattgtaattggaatgatggcatttactgatgatgtagtattcccgttaggttttttgagttttgttgtatcactgtttacattaagtacaataagttatgatgattttgataatggtaatgcgtttctattcacattgcctatcacccgtaacgattatgtaattgaaaaatattcccttggtttgctatttgggtgcgtggcatggattttagcaactgttttgggtgtgatagcaacggtatttaaaggaacattacctattacagatttaatgctggcttcattgataattctgcctattatgattgttattcaagcaatcatgattccttttcaacttaaatttggtggtgacaagggaagaatagctatgattggagcatttggagctttagcattaatcgctcttgttatcgtaaaaggagcaaaagccattttcaatattgatttagttcatttattggacactttaccaactgtaagtatggggatgttggttgtcattgcggtcatagttgccttggtactgttactaatttctatgaaaattagtctttcgattatgaacaaaaaggaattttaaagggggagcttatggatttaacaatattagctgttgtactactattatgtggcggtattcctttaagaaacaagatatataaagagcgtaaaaagaaaaaggaagaaaataagaaagatatataaaggggcgatattatggaaaaaattttatgcataattgctttaatcgtatttgtatattgggttttcatcaaacgtaacagaaaaaagtagttactgatatgaaaggggaataaaattgaaaaatacttggcaatgccctaaatgtggggcaacagatgtagtccgtattcctgataattctagtcgtcatgccagcggaaataatatatacacaagcacctatactttgtttggaaaaattcctgtaatacgttatgtttgctgtgaatgcggatatgtagaaaactgggttgaagcaaaagaagaattactggaaatcaagaaaaaatttggataattgaaaggtagtattgacaatatgaaagaatataagtatgtggaagtgaaatttgaagcaaaaggtggattattccattgcatttctaaaccaaaagaaatcatcagtaaatatgtgaaagagggatattcttatgttggatttatgccaactttaatagacgcacatggtagttttagaagaattgatttgatatttgaaaaatagaactcttggttttaaggcaggtgagaatggagtgttgtccggcaaattaaatgatgtgctgtttgcagactatacctatgctgatgcatgtcttaaacatcccgtttggagcggacagccttcccgctgaagcgtgcaggctgttccgctcaagcggaatacgcaccagagcctcatacccctcaaataatcgttattttattaatttctggttacctcgataaaaaatgaatatatactaaatgtcattatagattttacaggcattactagctaatcaagtattagtaagccatttttaattcgataacatgtttcgcttaattttgcaaaatctatgtcatgcgtaaccaatagtattgatttattcatggtatcatgcatttttttaaagattccttctacatttcttttcgattgatcatcgagattccctgtcggctcatctgccaaaataaattccggatcattaaataaagctctcgcaatagccattctctgtttttctcctccggataattctcttggatattttttcagaagcttctcatttatttccagataatctgccagctccaaagctctgttttgtgccgcatcgccattcattttatccaataatccaggtaaaattatattatccagggctgtaagctgatccaacagaaaataatcttgaaaaacaaaacccatcttttttcttcttaaatccgccagttcatccttccataattcttttacctgcactccgttgatgatgatctcgccctccgacggagttgtcaataatcccatgattttcagcagagttgtttttccacatccagatctgccaatgacagagacaaaatcaccctgattgattgtcagattgatttcctttaatacctctacatattcgtccgccctacctgacattttatatgtttttttaatattctttagttcctgcttcatgccttatccctccatgtatgggaaagtaattcctttatccgcttctttgatatattgagtaccagcagtatttgaatgaaaatataaataatccataatccgaatatatatgttccaaaatacaacgcttctgatatcgaaaccattctgacatggaatgttatccctatcgttatgattgaaagcaagagcgataaaagcaacggaacaccagcaaaatagtataactctcgattacttataattttcgcctgcttctggtgcattcccagacagaataacatatcgaacctgatccttctttcgtccttttcaaactcatttttcataaagtacaaaataacagtacataataatgttaagatgatctctaaaattaacgcactttcctttaaaattctttccatctttacatcccacattttatcgttcttgctatagcagggtagaatcaactgatcccaggaagaatcctccatatgcttttcaacaaatttttgaagttctgtctgaagtctcttatggtattttgcattttccttcaataagtataacctcgtcggtccctcggtgccagtcagactttggaaatatccatctgaaaacacgacaagattctcttgttctccgctttggaacaccccagttaaaatcgttcgttcttctcctgcaatcatgcgcggcggatacaccttttccctagacatatagttataaaatctaaccggctgtccgattcttaaatacggggtttttcgattcatataccagtctataggatgtgcatttatagaataatcttcctgataaacaatatagacctccttatcatttaaatttaatttttggggcgccactcctaaattctgacataaacttttatatgtacgataggatatgcctatgtgctgtccttgcggccaaattactttctggtaataattattcgccgcatcgatccaatctgtcttttccccttgaaccgacgtcaccctgaccataggataggagtgtacctccgctattccttgattctttatttcttcaaacctgttggcatcctctggataggccatgcaaacataatcgtacgggaataatgcttcagggtcgggtgccgacaaatttcctgccagtggcacgacaagaacgcacaaaaaaacaaaatggaataaaaagattgcagcctgcagtcccagttctttagcggcgcctctctgtattggaattttatccagcactttttttatagtatccctctgattctgccggaatagatttaccagtattctggcagaacaaagtaaaataattcctccaatcacaactccaaataatatgtaactgatgtcttccccgtttctccgctccgaatagcgaaataaaaaatatgccagatatatgaacgaaaaaaacatcaaaaacagcagatttcgcttagttaagaaagactttcttttcggacactgctgtttgagcgacatattttcctgaagcatatctgcaaatacacgaatgatgacaaatgagagaataatgtacaatacagcggaaataaaatatatttttacccctgcaaatttatctatggaaagattcatcaatcttttcatataagattccatacctgtgtacatgcccgttccaaggaggaatcccggtatgattgaaattaaaatgattagcccatgttcgtaccaccaaatttttcgactcagttcttcccgtatccccaaggtccataacaagacgtttcttgtctgatgactattggaataattataaaaagcaatggcttccaaaaaaatatataaagcccctattaccattaaagcgcctgttaaaataccattcagcccctgcatgggaagaagagcttccgcactgtaataatgctggaattgcgtttttaatgcataaagcgaaaatgcggatcctaacaggatcacattaccacacaacataaaaataattgcttttttttgatgaagtatctcgttctttatgatcttccacagcattcggtcgtactttccagggaaatagagccgtcttttgcgttccgctttttctaatcgctctcgctttttttgctcttcccactcactggtatatcgatctacgtccgctaagtagcgttcaatcaaaaattcaatcaaaatagcagctgcatagataatagcagccggcttaggaatatatccgacaaatgcaaagaaagaagttacatataccaatgtgccagtcaaaacgaatcctgttataatacgaatcggttttttgcaaataagcagtatcccttttataacagaacaaattccccccattaccggaaatgctaaaaaaacagtcagtaaatacgctgttccatctgtacctgctaattcattcagccttcctctaacaagagcctctgtataaaagtgaataatcgaatagtctgtatgatttaatttcagccatgggaaaacaaccatgatacctgctacaaatgacagaataatacaaacatatcgaaaaataacttttttcatttcctcttatatggtgtttataaaagcaaaacaccacactcctttcatttttcttgttttgagctttttacaattcagattctataaacattaatttcgctcatagcttggctattcaaatctgttactatctaagctggtacctcttagctggagccagcccttctaaaactacaacacttctttaaactcagtctatgtcaaaaactatttctattttaatgataccttttatcaataatcatttcgactcaaactgtttaacaatccgaatatgtgttgaaaagataattaaataactctattttgtgttttttaactctatataatgtcaaaatttatctaaggaacattatattactttctcccattattatcaagcaactgagccactatactatcgtcgctgggcttcaagcattggaccatatatgcaaaactcatttgatgccgtattacttgccccacagcatgaggaacaaacttataatagctgtaatggaattctgcatatgtgtaaaaatcagtctaagctgatgctggaagatatcgcaaaaacatgtgtggacctggtggaggtattctgcttctgaaatattcccaacatatcaaaacggccacagtgaaattaatctggtaaatatataaatgattaagcgggcaaatatttcctgcaggataaaatccaccttttttgcgtgaaagttcgttaatcctattgtttattttaactcccggaaggaacgttcaattccccaccgtaatctacacagttttttgatttcttccatagggaaatccttttcatttaaatttgtaatgatacattccattgtgtgagggtgcaacgcagaagggcatgtgagcagtgttttttcagagaggatgagctcacgaccgatgggatggagtgagacgggctcagacaggatgtgcaggctgagatgttttatccggaactatggaagggaaaaagtaatcgacttggtatcgcagcggaaacggtatacagagaagcaaagggaggtccaacggtatgcggaggctctgcatggatcgctatcagggacttccacagtacggaagatccttgccatccgggaacagattgggaatatataatcttgccaaaaagaaaatccagttgtagattgagaaaacaagtctaaagttatatcttcttaggagcagtctttttcatgtcaactgacaatttatttatttcatcaaaagttgggcatatggttgacaaaaacggccacttatgatataaatgtctagtagtcgtttttgcctgtttattagtaagttttttttaactacatataggggattggtcaagtggtatgataggggtctccaaaacctttggcgggagttcgattctctcatcccctgttgaccgaagcgtcagaaaccttgattttcaaggcatctggcgtttttcattttctggataattccaatgtagtcaaacagaaattatccctaaaatgagatggcattgtcaatctgtttttccttatttttcgttgttttgttgatgaaataatataatttttttgttgtactgatatcactgtgtcccatttgttctgtaatgaatccctcgtctacatcactgtctatcaatgtttttccgtaggtctttgggatatgcaactaattacatattctggacagtcttttattaaaagtatttcctctgatacgttttccgttatgctcaaataaatacgttcctgttgtatacagttccagtatttgatttaacgtatccggtgcagtagaggatatgattaaatctcgattaccagcgtctgttttagcgtgttcttttacagccacaacccatttactattttcgtctcggtatttatcctctgtacgtctgattttaataatacgtccatgtaagtcctctttctttaagcggtaaacttaaggcggagacaaaagcaatcctttttctgtcgggcatacaaatgaaaggatttagatgattatggagaaaataatgaatacaaaaatggaaggaaatacctttacaaagaaaatcggtcagacggtttatgttgtttgctatcactttaatgaagaagcaacggaaaccatgaaggagaaaattaaccagatgttggcagcgaaacccattatgccagtgcatttgactggcggaattatgagtatacgaagaagccactggaattcagcaacactgaggctggtttcatcacattcaaagcatgggtagatgacatagcagaaaaacaaagaaaaaccgctgtaatccccggaatggggccaagcggacattactggtttgcgctggggaaattcctgaaggatagtgggatgaagcctgtacatgtgaatccacaccatgtcaagaagtcaaaagaactggacgacaacaactccaataagaatgagcgtaaggatccaaaaacaattgctgcactggttaatgaagggcgcttttcttatccttacgtaccaaccggtatttatgcggagattaggagcttatcgaaccttcgcttccgacgcaggaggagcttacgagaatcaagaaccgaatcgccagatggcttgctatttactttcctcaatataaagacgtttatggggatttaaaggcggccagcggacggatggtactgaaggaggctccgctgccggaggattttttctaatcagttgttgctaaaatatgatgacttccgatggccggctgcgaaaaaagtagcatggtaatctcttctgtcaggctcattgcgctggcaggagtatgggaatcttgcccgatgtccagcttaccggctctgtctgcttttagccatgtatggtttcctccgggattcctaattctttagcggcttcagcgccaccgatttcttttgccagttttactgcctgcactttgtattcatggtcatatttacgtgccactttgagtggttccttattctcttgattttattatgaaattcttgagaataaactgtcagctttttttatactacaccaatccgagaagatagtgatccccaccgttccggctcctcatcctcaggatgataaaaaaataattatggcatatttttggaatatatgccaaaaaatattgtaaaaaacatgagagaatgttaaaattagaacaaggtattccttagatgttccataaatgattaaaaatattctcttaatattctttaaatgtttttggaataaaacagggatttttcatcttaaaagacaaggagggaaaagtttgaaacagagaggtagcggatagagaaagagtagattgcgtagcaaacaagccatcaggaggtggcctcaaaaaattaaatatagacacaacatctaatcagcttgctattaaagcatttgcgggaaatcctagttgatgtggctttgcggttgcttttattattccggggacaacatcctgcccatgaaacgaggtgttttgatgaaggaaaaacagacatatcacctacggtttcagaaaggactttttgccgaacacatcagaaaagacatcgtcaagcttgaagttggaaacaatatgacagttttgtgtgcgattcttctatgtacctttcagccggataaccggacgaaagagggaggtccccggttcataccccgaaggtaagattcaacgaagatgtttgcccaatcggaacaagccgtcttgtacattgtgctacggaatggttaaagaacaataaataatcaaaagaagagaataaaaggagataaattatgtcaaatcagcagacgcagcaggctcagcctcaagtggcaattcctttgccaaagggaaagaaaaatgccgttcagatcggttgtatttgtatgatgctttcagtttctatgtatggtcttgtattttcaacacttatatcaccaatacttgaaagtgttaatgctttaggatatgtatcattattctcaattttcgcaggtcttggagtcgcgattatgactccaattggtggaaaacttggtgacttaatcggcagaagaaatatcgttgtgattcctggaattatttgtgcagcatgtggtatcacattcgcattcgtgcgttcattggtacctcttatgattctacgtcttcttatcggacttgctcagggagctttcacggccgctccatacattctggtaggcctgatcaacgagagaaaagacgtaccaaaagcaatgggtatgcttgcaacagcaattgctgtcgggggattcggcggaagtatcatcgcaggtatcttaacagatatgggattccttaagattgcgatcatgatgccgtcgctccctcttcttcttggtgtagtattaattggaatgaacatgccgaatgtgaagcgtgaaggtaaagttaagatcgatgtaccaggtatcattgcactcgtgatcaccctttgcggtatcctccttgccctgaactttggaacgacaatgggatggacaaaccctataatccttacaggatttgtaatcggcataatcgctcttgcagtccttattaaaattgaaagcaaagcagaagaaccacttattccattacgtctgttcaaaaacagaaactacacggtattacttattgttggatttatatgctacttctatctgaatgcaatgaatgtttatgcgccgatcggtgcactgcgagtaatgaaggtttccacaactcttgcaggaactcttcagatgccacgaacaattgttacaatccttctgccaacaatcgttggtgcatgggttggtaaaaaatctggaaatgcgtggaaagctatggctcttgcaacatcacttgttgcaattccaatggctgttatgggattcacaacaccaaacacatccattattgtttatcttgtagctcttggcgttacaggtattgcagagagtttccgttctgtatcaatcacaccatctgcgcaggctactcttctgccacgggatatgggtgtaggtacatcccttgtaaactttgtcaactcacttgcaggaacaatctgcccggcagtttgcggtgttgcttacaacattaatactgcagctgatcctacaaacgtagaaaacatacagaatggtgtaaatgcggtatttcggcttgcatcaatcatattgacaattggttttgtggttgttatcttcgtaataagaccgcagatgacaaagaaaaaagaagcctaattttaacagataacgatttcaatagtcggcgtatatagactgatatgcggtggtataattatattcatcgcatatcagtctttctttatatcataagcgccgttggaatatagcaggcttgcattatgttccttgattctgtaaaattagtcaggagaggtgacgaatatggaaaaaagaattgttgttattaccagtgattatttatatacctttgtatcagaagcttataaagaaattaatctggactgcgaagtggaaatagttaaatatgataactttaaaaaccttgcaaacatctataaccactacaaagactctgcactgggatttattgtcagtggacagatggcacatgcggcaatcctgaaggcaatccccgactgtaaaaaaccaattgcacattttcaggctgacaatgtatgtctatatcgtctgatgctgaaatatcttataaacgcccaacatccagattccaaacgtattattctggattttcttcttttaactcacgacaatgcgagcatggattttttcataaatggcctgaatcttccatttgtccgtagtactcttgaggaatgggttgaaagaagttctttgtctgatctgacagcaattgaggaaaaaataagtaaacagattattgatctttgggatcggaaggaaattgacggggccatctgtctctacagttcgatcattccggccttagaatcgcacggaatcccttgcagctatccgtttcccaacaaagaacagttagaagatatggcaaaatacattctggcacaatcggaacttcataatttatatgaaaattttccttctgttatttcgctgaaatgcatcgatgattctcagtcttgttattccttgatggatgctcttgttaacattaagaatgattttgctctggatgttattttcaaagaagaacatgagaatattcatatgtttacaagtgcatcaatcgtagacttattaaccagtgatcagacgcagtgccacttaagtcaaattttaagaaagaactatcatatgtccgtctcaattggttatggaattggcagaaatattgccgcagccaaacttcatgcgagtgctgcattaaaacaatcgcaactttccggttccagttttatcatagacaaagatcaaaaagtaataggccctttaaacacggattgctgtctggagataaacggacagatttctcctgaaatctctaagatagcaaaacaatgtaagctttctactcttacgattcaaaaactgatcactattacaaaaatgaatggaaataccagattgactactcaggaacttgccgaacgcttaggcgtttcaatccgaaatgcaaaccgtattttgaaaaatctcaaaaccggcggcatagccactcttgtatacacacaatcttctatttcgaaaggccgccctattaatatatacgaattgaatttttgagtaaacttcgaagacataagaaagtgaagttattccgaaagaaacaagagttgaaccttttcaaagaatagtgtgagaataataagatattttatagaaaaacttgactaaaacagcagacactgttatattgttaacaagataaatattccataaatattccataaatagtctaaagtatgccaaaaatatttttaaaatggaagattgagatgatggagtagaaacaaatacaacaaggagggtaacggatgaattattatgaaaaggcaatggaattgaaagaagagacaattatgaatcgtagatacattcataagaatgcggaaacagggttagatctgcccagaacaaaagcatttgtcatggagaaactcaaagagtacggtctggggccgaaggattgtggttatggagttacagctacacttggaaaaggtgggaaggttatcctgcttcgtgcggatatggatgcgcttccaatgccggaagaaagtggagaatcctttgcgtgtcctaccggtacagaagcccatgcatgtggtcatgattttcatgcagctatgcttttgaccgcggctaagatgcttaaagagaatgaagatgccctggaaggtactgtaaagtttatgtttcaaccggcagaagaaacattccagggaagtaagaacatgatcaaggaaggaattcttgagaatccaccggtagatgctgcgcttgcataccatgtatcgcccggaaagatgccggtaggcctatacatgttcaacgataaggatacaatgatgtattctgtggatgggtttaagattacggttaccggaaagggctcacacggtgcatatccacagtccggtattgatccgattaatattggcgtacatgttcatctggcacttcaggaattgattgcaagagaatgtgatccaacccattcctgtgtgcttactgtcgggcagtttcaggcaggaactgctgcaaatattattccgcagactgcagttcttcaaggaacaatccgtacaaacaaagtagaggcaagggagttgcttgtccgcagaatgaaggaagtgacagagaaaacaactgcagtatatggcggacgggctgagattgagatgatctccgaggtacctcctctgatctgtgatccaaagttgacggatgaggttatcggttatatgaaagaacttaaaattccaggattaaaaggttatccggggatttctgcaagtgcatctgaggattttgcagtcattgccgaaagggttccaagtacattcatgtatctgtctgccggatatctggatgagcgtggagagtatccggcgcatcacccaaaaacacaatttaacgaagatgtatgcccaataggtgcagcatgcctggctcactgtgcaacacaatggctaaagaataataagtagtcgagtaaaaagaacatggagagtaagaaaaattctaaggagaatattattatgactatcgaacaatcacaatcagttgtggcgatcccactgccaaaggaaaagaaaaaaatggttcagataggctgcatctgtatgatgctttctgttgctatgtatggtttggtattttcaacgctgatatcaccgattctggagagcattaatgctatgggctatgtaggattgttctctatcttcattgcacttggaatctctattatgactcctatcggtggaaaacttggtgacttgattggccgcagaaatattgtagtaattcccggtattatctgtgcagtggctggtgctgctttcgcatttgtacgatctttgattccattgatgattctactcttgatcgtcagtcttgcacaggggggatttacggcggctccatatattatagtcggactgattaatgagagaaaagatgttccgaaggcaatggggatgctggcaacggcaattgcagtcggcggtttcgggggaagtatcattgcaggaattctgacggatatggggcttctaaccgtggcgattctgatgccggaaattccgttaattattggcattgtacttattggcctcaatatgccgaatcaaaaacgtgaaggcaaggttagcattgatgttcctggtattattgcgttgattgtgacactttgcagcattcttcttgcattaaactttggctcttctgtaggatggacaagcccggctattattgcaggattcgtgattgggattatctcgctcgttgtactggttaagattgaaggaagagcggatgagcctttgattccattgaatttgtttaaaaacaggaattattcagtattattgatcgttggatttatctgttatttctatcagaatgcaatgaacgtatatgcgcctattggagcgatgcaggttataggaacctctacaagtgtagcaggagcacttcagatgccgcgtacgattgtgacaatcattcttccaacgatagctggcgcatgggttggaaagaaggcaggcaactcatggaaggctatgattatagggactgggcttgtcagcatccctatggtgctaatggcattcaccagaccaggtacctctattatgatctactttgtggcacttgctattacaggtattgcagaaagttttcggtctgtatctatcactccagcggcacaggcgactctgaatccaaaggatatgggggtaggcacgtcccttgtaaactttgtaaattcacttgcgggtacgattgctgcagcggtgtttgcagtcgcttataatatgaacacaacagcagatccgacgaatacaagttatattcaaaatggtgtcaatgcggtattctgggtggcagctattgtttcagcagttggtcttgtaattgtccttttagtaattaagccgcaaatgagtaaaaaaactgaattataacaatgaaagataaatggcagaaaaaatgtgaatttatccttccgtcttaccgaatattagaaatgatttcctggatgtggtcatagcgggtaagagccggaagatgggacaaatattgggggatgctatcctcctaaagaatactttgctcggcaggaataaagaaagtacgcagacactccgaaggtaagcagtttggcaacgggtaccgccggccatacgccgtttactccgttgagcgcgggaaggatgagcaggtaattcatgccagagaacaggaaactgaaggaaaaaagtaaaaatccgggcacggcaatgtcatatactatagtttctgaaccggcgaaaagcgccaccagccgcggaccaaagagcagtgaagcaaggaatatgccggcggaactggcggcgatgaatctcaggcagatcctacagagattctttagccgcaggcggcatcgggcgccatagttaaaactgattacaggcgcgacgccattttcaccggtcccacggcatcggagaatatccggtgcagatggtattttgaatatcccaccgatttggcgatagaggataaggtcaatttctcgctcaaatgttcttctatataattgatgactgatataatgttttctactttgttcatccatgcaaccttccttattagtaagattatagacaattattaagccgatgttttaatagatgttgcggtttttcctacataaatattgaaaaagagtaataatcttccatgcttgtctatataataatactacatagccgcgataaggaaagagtaattccgtacggccgaataatatggcaaagaggagagttgtgggatggcaagatgcaagaaatcgtatgaggaccaattaaaggcagtggaagaacagatagcaaaggcacaggagaaactcaatcatctcaaagaacagcgtgaaaatatcctgtcgaaaaaacgagaggaagagttggcggaactataccaggtgcttcaggaaaatgaacttacggtagatgacgtgttaggcatgcttcaggaaagcgaggcgcagacagcataagtcggggaacggggcaagagagtcgaatcttttgccccgttattgtatattcatggaaaaactatcaatgatgtaaatttgacatcccagccgattgtccttacaatgaagatataaaaagtactaaagagagtgaaagagaagatgaaaaaacagaagaagaatccattatataaaagtttccgctatgcattcgaaggaatcatcgcagggattaaaaaggagcggaacatgaagatccactgtacggccatggttctggtcattgcagcgggaatcatcttgaaactttccgtaacagagtggtgcatctgccttgtgctctttggaatgatacttgcgctggaactggtcaatactgccatagaggcggtggttgacctggtaacggaagagtacaggcctttggcgaaactggctaaggatacggcagcaggcgctgtcctgatcgcgtccataatggcagcaggggcgggaatcctgatcttccttcccaaggtcctgagacttgtgggagtgctttgatttgcggggatgcatatatgtataaaatggtgtagaataatggagaacaagcaaacaggttttattaacagaagacagaaaggggaaatgcagcatggagaaactgggagatggcgtaaagaaggtactgctggctggcattggcgcagtggccgtgacagccgagaagtcaagggaactactggatgagatggtaaaaaagggagaacttaccgtagagcaaggaaaggttctcaatgaggaactgaagcataacatcaagaagacggtgaaggaaaatgtcaatgtatcggtcaagccttcttctgccgaggaactggaagaactggtaagccagatgacgccagaaatgcttgccaggctgaaagagcagattgcaagaaaagaggcagaagttaaagccgatttaaacgaagaagttgacggagcaagggatgagtaaaaaggaatcaggcgaatacggtgcccgattaagagagatgacctctgtactgcacaagcatggcataaccagaggggtgactccggaaaaactccggatgatactggaagatctgggaccaacttttattaaactgggccagattatgtctatgcattcggacatcctgcccaaacggtattgtgatgaattgatgcggctacagtctgaagtgacgccgatgccctttgaggaagtgacggaagtaatcgagggagcatatggctgcccatggaaggaaatatttctcgagattgaagacacgcctcttgggtcggcctctattgcacaggtgcacaaagccgtactgggcaatggatgcaaagtggtggtgaaggttcagcgaaagggaatctatgagacgatggcaagggatatcagcctcctccacaaagcagtaaagcttctgccgccggtcagcctcaaaggcgtagtggatctggacatggtcctggacgaactgtgggcggtgacgcgcgaggagatgaatttcctgacagaagcagcaaatatggaagagtttgcccgtagaaatgaaggaattgcctacatcggcacccctgtgctctatcaggagtatactacgctccacgtgctggtcatggagtatattgaaggatataggctggatgaaaatgaagcgcttatcgatgatggatatgatttgaaagagattggcagcaagctgatagacaattatatcaagcaggtgatggaagatgggttcttccatgcggatcctcattcgggcaacgttaagatacgggatgggaagatcatctggattgacatgggcatgatggggcgcctcaccgagcgagaccgcgaactgattggaaatgcggtgcagggaatcgcgttaaatgatatcgggatgatacaagaagcggtgctcgcactgggagaattcaaagagaagccggatcagaacaggctatataaggatattgacggcctacttcttaagtatggcaacgttgatatgggaaagattaacgtggcagaggtcatgatggatctcatggacgtcatgaaggaaaataagattgccatgccccatggcctgacgatgcttgccagaggcctgacgcatatggaaggtgttcttgcaagcctgtcgccggatatcaatatggtggagattgcttccgctcatatggctggcgaagtcttaaggaataaggactggaagaaggaagcaaaggccggaggaaagagcctctatcggtcattgaagaaggccttggatattccggcgctgacggcggatatcatgcatggctacttaaaaggacagacaaggatcaatctggatctgcatgcggcggatgatctggccttgcttcttaggcgtctggtccgcaatatcgtgatggggctatgggtaatggcgctgctgatcagttccagcatcatatgtacgacggatatgtcgcctaagatctgggggattcctgcgctgggagcctttggctacctgatggcctttgggattgtcgtgtacgtatttataaaacatattttttcgaaaaaataaaggatgcaggggaaggatatgcccctgcatcctttttggcaagcggatcattactggcagcatttttccatatcttctacgaagcctgcaatctgggcagggttataaggaatatccagggtaaaatcgctgaatgcgcgtatcttctgaaaatacagattcgtatcaggctcctcatggccgtttctgcacatgtggtacatggtaacgcagtctgttgtcttggtatctgtacattccttgcagatcctttttcccagataataatatcttccctcaatatcatacaagaatccagggatagcaaaggaataatgtgaaaaatgtggataacaataggcaacgataggggacggggcatttttaaaaatgccccgtcccctatcgcgattatgtataaaaaagcaagtgagtatttgtgcaatattatcaaaaaagaaaataattgttgaaaattgttgacatatgttacaaaagagcatactatgagacaaaagtaatgcaaaagtaataaatatattacaaatgtaacgaagaggaggacggttaatggacaatatgtcaaacaatgaaaacaatcagggcggctcattaggtctttggacttgtgtggcaatgatcgcaggaggtatggtcggaagtgcaatcttctcattgtcaggcttaacaatgacggccgcaggaccatcagcaattcttacatgggcaattgcggcggtaatcatgttatgttacggattgatttgtgcagaactttcaacaagatttccgaaatcaggaggagtgttcgtatttccttctaaggcacttggaaaaacagaaaaggaaggacgtttgtggggatggatttctacatggggatatattaatgcaaatattgttgctattgcatttgcagcgatttatgtaggaacatatttaagcgttggattcccgatatttgaagggaaacaggttccgctggcaattgtttctatactttttatttttgttttaaacagtgtaaaattctcacttgcaggaaaggtcaacaacttattagtattagggcttgtaatagcaatggctgtttacattggcgttgcatttacaacaggagcatgggatggagctacattaacaccgttcttcacacaaggttctgcaggaagcacaggttttcttgcgatggtacctacagcaatggttggatatggctctatcgtagcaatggcattcatggtttctgaagttaagaatccaaacaagaatgcgccaaaatctatccttattgcgttgattcttgtagtatctttatacgttggaattatcttagctacagttggtatggtatcagcagaatatcttatggaaaatccgggaatgcagtttattccgttatatgcagcagcgtttacaaaacttgcatctattccatggatatctaaagtaatttctattgctgccttgtttgcacttttaacaacaatgcttactgttacctctcttacttcaagagctgtacaagcaactgcagaaaaaggacttatgcctgcaaaactggcagagaacaacaaagctggcgtaccggtatatgcgacaattttaattatggctccatgtttagtaatttcttgcttcccacagttaacatctacaatcgtaagctttgcagcattatttgcaacagtgacaatcacgattaatgttgtttcacttcttgtagcaagaaagaaatttgatttaccggaaggtgcgttccatgctccgggcggaaaagtacttccaattgttgctcttgtattgatcgttctgtgctatattcctgatatcatcggcggtggctggaaaatctgggcatatacaattgtatggtatgttgtgggattgatttattacaaagtaagaaatggaaaaaacaaatagaatataacataagaggagaagagtaatgggaaagaaaatgcaggatacatgtgtagcatacggatattttgatggtatgcataaaggacatataaacgtagcgaaaaagacggtagagaccgcaaaggaaaagggacttacatctgtagttgtaagttgtaaaaaagtcggagaggttctctcaactgaagaagaaaaagaatatttattcaaggaaacaggcgtacaggaatttgtataccgggattatgaggaaatggcggaagaagatttcataaaaaatgtactggtagaagaatatggtgcaaaagtaatcgtactgggtgagaatcattcaaatgttgcaaaagtaaaagaggcagccaaagtgtgtggcgcagaagttgtaatatgtgaggcagcgaaggcgcaagatggaactgtgattactacagaggctgtaagaacagcgtttgacgctagcgattttgacaagattttagaactttgcggacatccatatatcatgattggaagtgtagaacatggtaaggcacttggaagaacagttggaatgccgacagcaaatttaggtgttgcggatgataagttaaaaccaccgagtggagtatatgcaacaagtgtcaagattgatgatggggttttcaaagcaatgacaaacattggtaagagaccatctgttgacaactatgattatgtgacaattgaagcgtttatcctggattttgcaagagatatctatggcaagaagattattctcggagtacgtcagtttgtaagaggcgttcagaaatttgataatcttgagcaggtgcaaaaacaggtacagaaggatattgagaaagtacgtgaagtactttaatctgtagcaatgtagtaatgatataacagaacatataataacaggagccgaaaatgatttttccggttcctgtttttttaacttatacatatttcagcagatcttccggtgaattcagtacaacatcggtttttatagaggcagaatcctgacatccccaggaagcgagtccaaaatcaatgcccgcgtgatgagcgcattcgctgtcggaaaaagtatcaccgataaaaagtgtggatgttggattggcatggaaccggttaatacattcaaggagcggccgtgggtccggtttgtggaatggtgtgtcgtcttcgcagataatatgttcaaagcatggataaatagaataatttacaaaggaacgccctaactgaatgcgtgttttggaggttacaattccaagacgagtgccttttttatgtagattaaagattgttttttccatgttagggaacagagatactttgttgagggcttccatatagtaggtctgaccgatatgtgccgcttctttccacctgtcgccggcaaatttctggagggtgatgtagcttggggcggcaagagcggaatgcaattcttcataactgtaatctttcccgatagtagccaataaggcattgcgaagtgaatacagtattgcgggagcactgtccgtcagggttccgtcaatatcaaagatgattgttgaatagggcattttatctggcctcctttctcagattaagaggataaggatcttgattaattaaaaaatagcatagaagaaatatctggtcaagaaaaaagcactaaaaaagaagatgtgtatttgtgcaatgttataaaaaagaaaataaatgtcacaagacattgacatatgtaacaaaaagctatacaatgagacaaaattaaacaaaagtaatatacacattacaaatgtaacagaaaggaaagaagaatatgaacacaacagcaagaatgaaccacatttttaatgaagatggaaaaacatttattttggcaatggatcatgcgcagaactttaatacattaccagcgcttgcaaatccaaaaaaattagtaagggaaatcgcagcagcaggagctgactctttcttatctactgtaggtatggcagaacacttaacagattctttccttggaaaaggtatcatcgtaagagcagaaggcggtgtttctttcctgggagacaaatctaaaccaatgcagattacagtaaacgcagaggatattgtacgtatgggggcagatgcagttatcacaatgagtttcccgggatctaaatttgaaaatgaaattttaagcaaccttacacgtgtatgtatggatatgcacagatggggcgtgcccgtagttgcagaagcacttccaagaggattcgagcccgcagaagattcaagaacaccagaaaacctcacatttgcatgtcgtcagagtgtagaacttggagcagatatcgttaaaactaactacacaggagatcaggacagctttaagacattagtagattctacatataaaccggttgttatcttaggcggagctaagaaagttccagttgaagaacttctccgtgagatcaaagatgcccttgaagtaggcggtgcaggaatcgcaatgggaagaaatatctggggacatgagaacccagtaggatacacggcagcaattgcaaaattaattcacgaagattgcagtgttgaagcagctatgaaagagatgaacaaactttactaagattaacaacgtagagggaaacaaagaaatataaaaggagaatgaaaaatggaaacatttaaagtagcggttctcgaagaagaaagaaagattggatatcacgaagtggagaaaaaacagccaaaggacaaacaggtacttatcaaagtagattcttgtgcgatttgtactttggaacagagagtatatctgggagtcatgaatagatatccgtttgcaggaggacatgaagcagccggagttgtagaggctgttggtaaaaaagtagcaggtgtaaaaccaggagataaagtagcagtaagacttttgaactcttgcggagaatgttactactgcagaaacggtcatgaaaaccagtgcgtaaaatcatttattgctgagacacaggaatgtgcaatggggccaggtggactttctgagtacatgatggtaagcgctgatgatgtatataaagtagcagatgatgcagatttatcacacatctctatcacagagccactggcatgttgtgtacacagtatcgaaaatggaaaaatcgagttaggtaacgatgttgtagtaatcggtattggtattatgggagcacttcacatccagcttgcaaaattaaaaggtgcaagagttattgcatgcgagcttgacgaaaagagactggaagttgctaagaaaatgggtgcagatattcttataaactctggaaaagttgatgcagtagaggaagttaaaaaactgacagatggaagaggggcagatgcagtattctgtacagttccggtagcagcattagcagatcaggctgtgcagatgacaggaaaacttggaagaacagtattctatacatcattccatccagacaaaccgattgaaataagccctaataaagtacattcctcagagcaggttattacaggaacagtgaatccatcaaaaaaagactttttagcagcaacaagactgttatctgcaaaaatcgtagatgtatcagaactgatttcagacagaatgtctttggatgatctggaagcagcatttgaaaaagctattttaccagacacatacagaatcgtagtacagcctgaataattgaaatttttgacgataaaaggcaaaaactactcaagttgggttgcgtaaagggtggcttgagaagtacaataaatctatcaaaggtcggaaatgagatataaagatacggaggtagatttatgcgacgcaaaagcataactgaagaacaaaaaaatgaataccgcagagtggcgtactattattataaagaagggcttacacaagaggaaattgccaaacgaatgaaaatgtcaaggcagcgggtgaacagaataataagcagttgtatagacttaggcattgtgacaatcaatatagaaggattggacaacagtaatctcgagctagaaaccaaactagaggataaatatggactgaaagaagtacggattattaatgaaacggcggatgaacaaaagatacaggaactaggtattgaagggggaaaatatctcagaagtattctgaaagataatgatatcatcggattcagcagggggaggaatacatcagcattggttgattttctgccggaagatgtagagtatcctcacaatataacagtgactcagttaatgggaagtgccatagaaacaaatgaaaatacagcagttgatgagacggtatatcattttgcagcaaagctgcacgcaaaggcatcccgtttatatgcaccgatcatattaagcaatgaagagttgagggattctttcatacaggagccgtattttgaaaaaagctatgaagttataaaaaaatgtgatattgccgtggtgggaataggaaccgcctccagtcaatggaagcatatgatttctctttatgacattgcggataaggaacagacagaatgggcgaaagatgttgccggagaggtgtgcacacatttttataacagtgaaggagcagcaattgagccgcctttcagaaaccggattatttcgattctgctggatgattatatgaaaattccggtaaggataggagtagcgggtggaaaggacaagacagaggctattgctgctgcaataaaaggtgattatatcaacgtattaataactgacttacagacagccagacaattaatggaatagggagaggaggaatattatattacatgtcccctttacagtaatgtaatctataggacgcatgtcaaacaatgaaaacaatcagggtggttcattaggactttggacttgtgtagcaatgattgcgggaggtatgatcggaagctcaatcttctcattgtcagggttaacaataacggccgcaggtcctggagcaattcttacgtgggcacttgctgcagcaatcatgttatgttatggactggtttgtgcagaactttcaacaagattcccaaaatcagggggagtattcgtattcccgtctaaagctcttgggaaaacagaggaacagggccgtctgtggggatggttctctacatggggatatattaactctaacattgttgcaatttcatttgcagcgatttatgtaggaacatatttgagtgtagggttcccgatatttgaaggaaaacagattccgctggcaatcatttctattctttttatttatgcattaaacagtgtaaagttcgcacttgcaggaaaagtcaacaacttattagtattaggtcttgcactgacaatgattatttatatcgttgttgcatttgtaagcggagcgtgggatggagctacattaacaccgttcttcacacagggatcagccggaacgacaggtttccttgcgatggtgcctacagctatgacagggtatggctctattgtagcgatggcattcatggtttccgaagttagaaatccgaatagaaacgtaccgaagtccgtactcatcgcaatgattattgtattgtgcctgtaccttggaattatcttatctacagttggtatggtatccgccggattccttatggaaaatcccggaatgcagtttattccattatatgcggcagcatttacaaagcttgcatctatcccctggatatctaaactgatttctatcgcagctttacttgcgcttttaacgacaatgcttactgttatgtctcttagttcaagagctgtacaagcagtagcagaaaagggatttatgcctgcaaaattagcagaaaataataaagcaggtgtacctttatatggagctacattaatcacagttccatgtctgataattgcttgcttcccacagtttacatctacaatcgtaagttttggagcattatttgcagcagtaacaatcagtattaatattatttcgcttatcgtggcaagaaagaaatttgatttacctgagggggcattccacgcaccaggtggaaaagtacttccggttgttgctcttggattaattattctgtgctatattcctgatattatcggcggcggatgggttatctgggcatattctatcgcgtggtatgcttgtggattaatttactataaagtaagaaatagtaagcgtaattcgtaaaggacagctatagtaagaagaataagaacagacattgcaattaggatctcggaaggtaattccagatcctaattttttaaaagaagggagacacgagtatgaatccatatagttatgtaaaaaacgaaccatataaattatatattaacggggaatttattattccggaaaaagaagaaacattcgatgttattaatccggtcacaaatgaaccttttgccaaaacttacaaagccggaaaaggcgaggtggagatggcagtaaaggcggcaagagaagcttatgataacggaccatgggggaaaatgtctgcaaaagacagaagtaaattactcttaaaagccggaaagatcttagagagaagattagaagaatttgcatgtatagagactttggaatgcggtaaacttttcggaagtgttatgaattacgaaggagcaatgtgtgtagacgcatttgaatattttgcaggaaaaacccgttgtatcgaaggaaaagtcgttccgatcgatcataatactatcaactttgtgcaatggtatccacacggcgttgtgggagaaatccttccgtggaacggaccatttatgatggggtgtcataaaatctgtgcgattctggcagcaggtaatacagcaattgtaaaaccatcttcatgggcatcacttagtatgttgctgttagcagaagtatttgatgaggctggattcccgaaaggagttgtcaatgtactttcaggttcaggtgctgttatcggaaatacattggtagaaagtccagatgtagatatggtagctatgactggcggtactgacaccggtaaaagtattatcggatcttctaaagatactgtaaaagaaattgcattagaacttggcggaaagagccctaatatcgtattcggcgatgttgatgtagatgatgttgtaaaatgggcaagatgggcatttacccttaattctggccaggtatgtgtatccggtacacgtctgattcttcatagaagtatctatgaagagtttcttgccaaattaaaaatagaagcagaaagaatggttccgggtgatgggtttgatccaaagactacgcttagcacgctgatacataaagaccatgcatcaactgtatgggattacatccagaaaggaaaagacgaaggtgcaaggctgatctgcggcggagagccatatgaagatgaaaacctgaaaaaaggaaactttgttccggtaactgtatttgcagatgtaacaacagatatgacaatcttccaggaggaaatcttcggaccggtactttgtgtaacgccatttgatacagaggaagaagcgatcgcaattgcaaactctacaaaatacggtcttgcagggggagtatttacaaaggatatcaagaaaggcctcagagtagcacaggctatcgatggtggacagatttatgtaaattcttacttcagcaaaggaatgatcgaatcaccaggtactggatggagagaaagtggacttggggttgcaggtattcagaaatatatgatttcaaagacaattttcgtggacacagaagacggaagtgtaccatattaaaaatacaggaggcgcgttatggctaagttaagagcagtttattatattaatcagttctatgccggtatgggcggcgaagagatggctgatacaggattacatatcctggaagagaaaaaaggtcctgcacttggcatggaaccaatgtggaaaggcgaaatggaaattgtaaaggtattagtgtgtggagataattttatcaatacagatactaaatttgaggaagttcttccaacaattaaagcggagatccaggcaagtgacccggatgtattcatagcaggaccggcatttaatgcaggccgttacggagttgcatgtgcgaaaatgtgtgattacgtgaaaaaagagcttggaattccaagtgtgacaggtatgtggtgggaaaacccggcggttggtatgtatgggaaagataactacatcatttctacaacagagactgcaagtggaatgagaaagtctcttccaaaagtagcggctctggcattaaaactggcaaagaaagaagaaatcaaagcagcaagatttgaaggatatctcccaacagggcatcgttacaatgaatatcatgaaaaaacaggtgcaagacgtgtaacagaaatcttattagataagttgtataatcgtccatacaagacagaagtaccgcttagaggattcgaacaggtactaccggcagctaaggttgagaatcttgcagatacaaccatcgcactttttacaactggtggtcttgtaccagtaggcaacccggataaattaaaacaagccttctctgtaaattatggaaaatacagcattgagggacttgatgaactgaaaaaaggtgtttatgagtctatccatggcggatatgatacaacagacgcaagtaatgatccacatcgtctgattccacttgatgttatgagagatttagaagcagaaggaaagatcaaatctgtatttgattacttctatacaacttgcggagttggtaccaacgtagagacaagtaaagagatggggcgcaaacttgcagaagatctgaagaaatctggtgtaagtgcggcaatcttcacttctacttgaggcacttgtactcgttgctgtgcaacgatggctaaagagcttgacagggctggtataccagttgctcatattacagcatttacgtcaatcgctctcagtgttggttctaacagaattgtatttggcggagactttacttccccaagtggtaatccggaccttccaattgacagagaaaaagcatacagaagaagaatcattgataaatgtttagaggttctgacacaggatgtagctgagccgacattatttacagtagataatgaaaaggagagtgagtaacatgaagaaaatgagtaaaacattgactcgtcagtattttgacattaaagatgcaaggttcgcagataagacatctctggaaaatggcgtgttatcaatctccaaagaggaattaaaagcagaggtccagtccttgatgaaagctgtaaaatctgtagattttgaaattgtaaaaccgggtgaaaatacgcgtattattcatttgctggatactctgcagccgatgattaagattgaaggcgaaggacagcagtattctggatattttagtgatccacatatggtaggcgaaggaacaacaaatcttttaaaaggatttgcagtaatggaaagtgctgctctcccatgggatgagtcgagtgcaagttctggtcttctctacccaagagatgccattatagatatgcagggaccaatcgctgatgtcacaccattttccaagacaatcaaccttgtaatcgtatatgaattagaagaaggaaaatcttctatcgagtatgatacagatattcgtaacattggaatcaagatatctacttatctggctgctgtaacaaaagatatggaaccagacagtaaagaagatttctctattgatgaagtgaacccggatcttccgaatgtagtattcgtgtggaattctcagaaccaggggccatattccaatacgtttatctatggacatccgattgataaccttgtaccgacactgttccacccaaacgagctgatggacggatgcgtagtaagcggtaactatgtgtggccggcattcaaggttccgacatacttgtatgtaaacagcccgattctgcttgagttatacaaagaacatggtaaaacaatcaacttccgtggagtaatcttcggcagaagccataacccatccaactggcacaaaacaagatgtgcgcagatagcagtcaagattgcacagtacctggacgcagacggacttattatggcatgggagggcggcggaaatgctgcagtagatggtatgcttacaatccagtgtgcggagaagcacggaatcaaagcatctacgattacttttgagttcggcggagtagatggtacagagggtattcttcttgtagatgatgtaccggaagctgatgctgttatcagcgggggttctattgaaaaaccatttacaattccagatgttgaccgtgttgtcggcggagatgtacttcgccttaataaagaatccggtggattcttcccaccgtctgacaaagcgttaaaatttgaacagacgacacacctgtatacaggaggaaatcaggcaggggcaagtaccctgtttgcagaacagtactagaaacaataggggtgggtgtaggagcatcaagagtacaagattggatggatttgagagtaataagggacttgtactcttggcagcaacgaaccgtccggagattctagacccggcacttcttagactgggacgtgaagaaagaccgtgtcatgaatcaggaagaacgtattgctatgacaccagtggagacggcagaagatataaaatcttaatagctatgatagacccagcgttgattgacgttgggtctttttatatagaaagtttttattttatgacacaaatatacgtatggtcaataattagaagaatatataaaaagaagcgattagacattcttttttttatgtctgataattaataaggcacggtaagtgtaatctgattgtacaaaggagaagagagatgaagaaaattatttcgagcatgttaatcgtagtaatgtttgcgacaatgctggtgggatgtggaaaacagacggaagaaaacaaagaaaccaagacagaggaaaagaagaaaatcgttatgggaggtcctgccatgttcatggattatatcgatttccttccagaagttatggcagaaaaaggatatgaagtggaaattcaggtatttgatgatgtggtaacaccggataatgctttggcagaaggttctattgatgctaatttctatcagcacaagccatatctggatgcttataacgaagctaatggaacggacttatatgcgtgtgagccttatattatggcgtcttatgattgtgtagtcagcaaaaagtatacaagtttagatgaactaccagacggcgcaaaagtagcaatttcagatgatgcgagcaatttgtctgcaaatctgcacagcctggagttcctgggattaattgaattaaaagatattccggaaggctcttattatacaacatttgatatcacaaagaacccaaaaaatctggagtttgttgaagttgagatgaattctaaatatgcgattctagatgatgtggacattgcaatggtattctacagcaataaatcagcagaaaaatatcagtgtaatatattgaaaatcttagatgatgatccggttgttgcattcccggtaatcgtagctgtagatggtaagaataaggaccagcagtgggtgaaagacatgatggaagctatgactggcgaggaaatgaaagcaaaacttgatgaattaaacacaccgaataaagcatggagagttctttttgaagagaagtaagttgttatgatagaaatttgtgatttaaataaatcttttggagagttaaatgtattaaaaaatataaatcttacaataccaacaggtgaaatatacggacttgttggcagaagtggggctggaaagtcgacattgctgcgctgtatgaatgggttggaaggatatgattcaggcagtgtgaagatagatggcatcgaagtaaaagacagagataaagatgagatgagagatcttcgcaaagaaatgggaatgatttttcagacattttcattggtaagcagacgttctgtttaccagaatgttgcgttgccattaaagtgttggaaatatcctaaacaggaaatagataaacgtgtaaaagaattacttgagttagtagaaattactgagaaagtagatgaacgcccggaagtgttgtcgggaggacagaagcagcgggtcgctatcgcaagagcattagccctgaatccgaagatactgctatgtgatgaagcgacttctgcattagatccgaagactacgcagtccgtgctgaatcttctgcaggatattaatcgtaaattaggtcttacaattgtcgtagtaactcatcagatggaagtaattcgtagctgttgtgataatgttatgattttggaaaatggaaagatttctgaacagggttcggtaaaagagatattcttgagaagacctgtggctcttcttaatttgctgggtgagaattcttatctgaaaggaaattatgaccagatgatttcgtttttaataaaacaggatcagacagatgttatctcatacctatttagtacatatcccggacatatcaaaattgtagaaacaagtacgaatgagtatcagaataatgtgtacacacagtatacaatagaactggatttgccagaagaatgtcggaaaataaagcagttttttgatacaaagcatattttatgggtgcagcctgaagagaggaggctaaaggatggaacggcttagcttatctgaatatataaccaaagttgtctggcctgcatttggagtgacaatgcggattctgattgcaacggttattctggcaaccatattagggcttatcatggctatgcttcttacggttacaaagaaggatggaataaagcctaataaatttattttcaatacactggactttcttattaatattatacgttcttttccgtttttgatattattggtttcacttgtaccggtgacgagatttattatgggaacatctatcggggaaagagcagctatttttccactgacagtgtcaatgtctccttttgttgcacgattaattgcgtctcatatggacagtgtcgaaaaacaattgatagaggcggcgcagtcctttggtgctctgccacgccagatactgtggcatgttattatggtagaagctgttcctggaattgtatcagttataagttttacatttgtgacaggattaggagcaacaacagctgctggtatggtcggtgcaggtggactgggaagtattgcaatgcggtatgggtatagcaattttaatgataaaattatgtattccacagttttaattctaattattctagttcagattattcaatacattggagattgggtttatagaaaggtgaaatagggtggaaggatgacatatgaagagttgcttcgagaaatggagaagcaaaaggatgaaatgacggtaatggagcgtatgatggagtacgcgaaaggaaatgaagtggaccatattccgtatatgctttgtggagcagatacggcggctaatatgtatggatatacattgcagcagtatcgagaatcattggatgtgagatttgatattatggaaaagatgaataaagagtttggtacagcggcagtaggaatcggagttggcttgaagtcaattggagaagcagtaggctctactctgcgttatccggaggatggtttggattttgtaacagatcatatattaaaggattatgaccagcttgatgatatgaaggtagtggatccatataaatgttcaaacctcaagaagatcatggatgattttagaaaatcaaaagaaagattccccaattggggatcaggaaacaatgtggcaggtcctatgacaacagctacatctatacggagtcttgaggcaatcttaaaggatagcgtaagacgtaaagaagatctgcatagattgttagattactgtgtagaatgtaatttgagctggatacgtgctgtgacaaaagaattcggagtgcttccggttaacattgcagaaccggcagcttctctgagtgtgctgagtaaaaagcagttcctggaatttgaaaagcctcacttgcaggatatgattgctggtatcaaggaaattacaggcagaatgcctacaacacatatatgtggaaaaacgaaaggaatatgggaagatttgatcgagatgggctttacatctttaagtgttgataatagcgaagatctggaagaagtaaagcattgtgtgggagatagaatgagaatttccggtaatgttccgccagtagaagtgttgaagtatggaacaattgatgaagttattgcgtctgtaattagttgcttgaaaaaaggaagtgacagtccgatgggttatgctttagcagcaggatgccaggttccgccaggagtaccaagagagaatttgtatgcatatatctatgcggcaaggaaatacggaaggggagcgaaaaaaggctgtcttccaaaaggactaagtgaaactgtatagtagtattttatattatttatgtcaaaaataggggctgtaaaaaaagtcccctaaaagaaaaatcgctgaggtcgtgagacttcagcgatttttgggtataattaattatgctaaaaataaaaaataccaatatccgtatcttctcgacggcatgaaaactccttcttacctttatgcgaatcaaacgggattacatgggaaatgatcagcttattccggcgtacaacttccaggctgccatatcctttttggcaagcggatcattactggcagtatttttccatatcttcttcgaagcctgcaatctgcctggcaagggactctctgtgtgcatcagtcagggccgctgccagagctgccatattctcttcaatctgggcagggttataaggaatatccagggcaaaatcgctgaatgcgcgtatcttctgaaaatacagattcgtatcaggctcctcatgaccgtttctgcacatgtggtacatagtaacgcagtctgttgcctcggtatctgtacattccttgcagatccattttcccagataataatatcttcccccaatatcatacaagaatccagggagttttaataatttttccaccatcattgaacgatacctcctttatctaaatacaacagtaacaaatatggcgggaaaaagcaagccttctgaagacttctggcggagagggagattcgcctgcttctgcgcctatatagacaggttcttccggctgaaatgcgcgattgcgatcaggtagcaaagaatcccgacggcatacaggatcaggcatccgagaaaggcatcgcttttggaggtggccaggccgtccggatcaaagagggtgagcggcgtagcgtactttagattctcaaatttgtcccctacctgggaaatcatctgcatcaggatggagtacacaacgattgcagacgatgctcccgtgcagtatctgctttcattaaaaaggcaggaaaagaagaagcagattcccccaaaaaagaggaacaatcccaaaagcccgacatttacccgcaggaaggcggtcttttccaacttgccggggaagagcgcttcactaacgataagtatcaagagagtgacgtatactgccatcgcaagaaggcaggcgaccatgaaaaaggcctgtgtccctgccagcttgcttcgcttatgaggaacggacagcaaatatgccatagagccattgtctacatatcttgcaataagccggttggacaggaggatgatgaagactcctggaaacgctgtaaacagtataccatataaatagcctatgatagactccaacagcgtggttcctacatctgccattccaaacgcggagaacaactggggcatgctctcggccatggctcgcaggctgtcgccaagcttagggtcgaacatggcaatgatcatgcaggaatatatgcttaaaacggcaagaaatatgagaagcagtatatagttggatttgaattctttttttaataaggtcgtgttaatcatcttccttccctccgtaaaaatgcatgaatatttcctccagcgactgggtctttatatccagatcagccacagaatactcggaagccaacttaaccaaggcatccatattgcccttaatcttgacggtgacggattccccgttccggcgggcagaaggcattctggatgcaaagtccagggccatttccgcggaggggaattttaattctacgatcttacgcttgttctggcgaagtttttctatatcctccactgctgccagacgtccttcacgtatgatagcggcgcggtcgcaggtacgctccacctcttcaaagatatgagaggacagaaggatcgacttacccttcttcttctcgtcaagaatcaggtcgatgaaggcgctttgcatcagaggatccaggccactggtgggctcatccagtaaaaggatgtcaggatcctgcataaaagcacatacgatacctattttctgcttggttcctttggacattttcttgatcttgggagaaggatccagttcaaactgctccatcagctgacgggcgcggccaagttccttcatgcccttcatccgcgcaatgaaccggatgaattccatgccggtcatagagtcgatgaacgcgatctccccgtgaagataaccaacaaagcgcgcaatctggtctgcttccttgaagcagtcttttcccagaatcaagaccttgcctttgtcaggctttaggaatcccatcagctggcggatggtagtggtctttccggcgccattggggccgaggaagcccaggacttccccgcgctttacctggaaggcaatgtcaaagacgccccggccgccgccgtaatctttggttatatcctgaatgtctataatgttcatgccagatattcctccttgtatacgaatttgcggaacatatccatccatttcgtgaattcggtcatcagtgcgtccatatccggatcctgattcagcatgcggatttcatgcagatagccgtctgccatccagatcagcatcttgcagatctcatggggggatatgccatccttgaatttgctggcatctatatggctgaaataagcctgatagatcacatcctgctggacgaaattatgattcctgaggtcattcgaaacatcctctttctcagagtaaaatgcccgcatggcaaaatccatgatataggggctgtcttgctccattacctttgctttttgacgggccgcgtattccagaagttcaaagaaatcggtaatattaagaatgtccctgtcaggtaactgttccttcatcacatccatgatatagtcataaagatacaaatacagttccttcttattatgaaaataatagaacagagagcctttggaaatccctgcttttgcggcgatcaggtcggtggaagcgtgcttgtaatcgtacttggaaaatacttctatggctgcgttgatgatctgatggcgtttttcttctggaagggcaaagaatttttcgttcatataacctcctttatatagccggcgttggccgttcaccggtcttattgactggaatggtcattccttaaatatcagaatacctgattgactggaatttacaacccctttacgagcaatttcttctatttttcaaagcagttttccaggactgatggaagagccagccgccaaagaccgtggctgcgatataggagaggattccggcctcattgccccataagcgtacgatatcacggaacacgatctggttcatataataatgaggtctgatatagaacatattgatagcgtcataatgtacccacggaattaccaggcacagatacatggggatgctgcatggctgaaatggaaaataccaccagttatattgcctgtggttcaggatataagtaaggcaccattgcttccataactcgcttaaaagtatcaggatgccgcagtataggtaaaaatgattctgcttcctcatatcagataatctccttgcttttattatacacaaataaatggcattatgctataatacggatagttgtctgctgacaaaagaaatatagatatcggagtgagcgttatgaaaattaaaaatggaattatgctggtgctgaccgcatttatatgggggacggccttcgtggcccaaagcgttgggatggactatttggggccttttacttttaatggcgtgcgaagcctgattggcggcgcagcgctgcttccctgtatctggctctttcagaagggaaatggcaaagacccggagaaacgcagcggtggcgccagaaaggatctgatcgcaggcggaattgcctgcgggtttcttctgtttgcggccagcagcctgcagcagattggaatccagtatactacggcaggaaaagcaggatttatcactgcgttttacatcgtgatcgtcccggtgctggggatatttcttcacaagaagatcggatggaaggtctggggggccgtgaccatagcgctggcgggactgtacttcctctgcattacggagaaggttgcgatgggaaagggggatatcctaatattcctatgtgctcttgtattttccattcatatactggtgattgactatttttcacccaaggtggacggagtgaagatgtcctgcatccagttcttcgtctgcggcatcgtatccctgccgcccatgttctttaaggagacgccgaagatcggggctatggtggaagggtgggcgccgcttttatatgcgggcgtgctgtcctgcggcgtggcttacactttgcagatcattggccagaagaacgtgaacccggcggtcgcttcattaatcttaagcctggagtcctgcttttccgtgttagccggatggatggtactgggagaaaaactttccgtgagggaatccgtaggatgtgtcctgatgtttgccgcgattattctggcacagctgccggataggaagaaggaggtgctgcaatatgaataatcagctgatcatggagatgacacgatattatagcggggatccaaaacatatccagcattttatgaaagtctatgcatatgccaggatgatcggcgagatggagaggcttgacagaaagacgcagcacatgctcgagacggcggcaatcgtccacgatatagggattaaggaaagcatggaaaaatatggagacagtgctgggcatcatcaggagcaggaaggtcctgcggtggcggagaatatgatggggcgtttgggttatgaagaagatgttattaaaagggtctgctatctggtaggccatcatcatacttatcaggacatagaaggcctggactatcagatcctggtggaggcggacttcctggtgaacctgtatgagaatggctcatccaaagagacggctcgtgaggtcctttacagagtatttgttacagaaagtggaaaagatatcctaaggaatatgttccttgcttgatatgaaactatgaaaaaggagaaaatggcaatgatcagagaaatcagagaagaagataagcagctgtatatggatttaacggaagagttttataattccgaagccgtgcttcatccgattccggaagcataccgagaggcgacctttcatgagatgatgcgctcgcaagattatgtaaaggcctatattctggaaaaagatgggcaggccgcaggctatggtctgaccagctatacattttcacaggaagctggcggcaaggcagtatggctggaagaattgtatatccgcccccaatttcgctgtcatggactgggaaaggagttctttgcctacgtggatgaacagattgcccctaaggtaatgcgcttgcggcttgagatcgagccggataacctgagggccaagaaactctacctggcaatgggatatgaggatcttccttatgcacagatgataaaagaagtacaggaggtacagtagatgcgttttgtaatacagagagtgtccgaaagcgaggttaaagtagacggacaggtaattggaaagatcgggaaaggctttatggtgctgattggcgtatgcgataccgataccagggaaattgcagacaagatggttaagaagatgctggggcttcggatattcgaagacgaggaaggaaagacgaacctatcgctggatacggtgggcggaagcctccttctgatctcgcagttcacgctgtacgcaaactgcaagaaaggaaaccgtccaagcttcatcgaggccggagagccgaagatggcggaagatatgtatgagtacattatcgggaaatgcaaagaacaggtagaagtggtagaaagaggccggtttggcgctgatatgaaggtaagtttggtaaacgacgggccgttcacgattatactggattcggagaagctgtaggctaagtggacacgtaacacttttcaaaagtgttacgtgtccacttagcttttttggttaaaatatctaattaaatttctgtaaaaagttatagtgaattcttaaataaatataaatacattgacatttatggtaatattgactaatataatcgttagatatctaactaattgttggattagacttttgagaggaggcgcatcatgcaggatacaaaggatgtatctgtctttatactgctgttccagatacagcatctaagcagatatcatgccatgaaacggctggaggaactggaattaaagccagggcaggccggaatattatttacattaaatgtggaaggggtactctcccagcggcagctggccgagaaaattgggattacgcctccgtccatgacggttgccttaagaaaactggaagaacggggatacgttctgaaggagcctgacggcagagaccagaggatcatcagaatccgcctttcagagaaggggaaaaaatgtgtagaagacctgaagaaggttatgggagatatggaagagattatctatcagggaatgtcccgggaggagagactgctgctgaagcgcctgcttctggaaatgcgaaagagtctgatggattcgaaagactttaaggggatggatatgtgctctatcatggagaagacccgtccgtccaagggacctaatgatttctagaaaagaaaggaaagacgttatatgagtaaattattgaagtttttgaagccatatgcgggcgcggtccttgcgatcctgtgcgtgctgatcgttcaggcgtactgcgacctgtcgctgcctacctacacctccgagattgtaaatgtaggcatacagcagggcggcattgatgagactgtgccggataccatatcggaggaagacttggatcacctgctgctatttgtgccgtcggataagagagaggcagtagaatccgcgtataaagaagatgcgggtgattatgattatgacggaaaagtcatgaagctgaaatcttccgtgaagaaagacgaggataagatggatgaactgtcctcccttcttggcaagcctatgctccttgcttccggattcgattccgacagcgacatgacgaagaagatggaagagcagatgaagcagcagatgcaaagtcagatgccggatgtaagcaagatgtccgtctatgacatatttgagatgatggaagacgggcagagagattctgcggtagaggagatcgagaagcagatgaaatccatgccggattccatgattgaacaggctgcggccacatatatcaggagcgcgtatggcaggataggcctggatactgataaaatagaaacagactatatcctggctacgggggcaaagatgcttgcgctggcggctcttggcatggtggccagcatcatcgtagggctgatggcgtcacgggtgggcgccagcgtaggaaaaggcttgagaagggatgtattccgcaaggtagtcggattctccaacggggagttcgataagttttccacagcctcgctgatcacaaggagcaccaacgatatccagcagatccagcttctgaccgtcatgatccttcgaatggtgctgtatgcgccgatcatggcaattggaggaatctggaaggtatttaatacaaacgtggatatgtcctggattatcggcattgcggtaggccttatcgtgatggtcgtaatcgtactgttcgtggtggtaatgccaaaattcaagattgtacagaaccaggtagaccggctgaatctggtaagccgggagatactgacagggcttccggttatccgggcattcagtacggaaaaatatgaagagaagcgttttgacggagcaaaccgtgacctgacgaagacgaacctgtttgtaaacagggctatgactttcatgatgcctttgatgatgctgatcatgaactgtattgcagtgcttatcgtatggattggcggccatagcgtaaatgacggcgctatgcaggttggcgatatgatggcatttatccagtatacgatgcagattatcatgtccttcttaatgatctgcatgatctctgtcatgctgccaagggcagccgtatccgcaacccgtgtggatgaagtccttgtgagccatacgctgatccacgaccctaagaatccgaagaaacttccgcaagatggccatggagaagtgacatttgatcatgtatccttccggtatccgggggcagaagaggatgtcctgcatgacatatcctttacggctaagccaggacagaccacggcctttatcggaagtacgggaagcggcaagtccacgcttgtcaatctgataccgagattctatgatgtgaccgaagggaagatcacccttgacggcgaggatatccgcaatatcacgcagcatgagctgagggataaactgggatatgtgccgcagaagggaatcctgttctcaggagatattgcttcgaacatattatacggcaaccctgacggaagcgaggaggatatgaaagaagccgctacgattgcccaggctacggagtttatcgaggcgaagaaaaagaagtaccaaagctcgatatcccagggcggctcaaatgtgtccggcggacaaaagcagcgcctgtctattgcaagggcgatcgcgaagcatccaaagatctatatctttgatgatagtttctccgcgcttgactataaaacggatgtaacgctgcggaatgcgctgaaagaaaagacggccgacagtacagtcctgattgtggcacagagaatcagcacgatactgcacgcagagcagattatcgtgctggatgaaggaaagatcgtaggaaaaggaacccatgaggaactgcttaagaattgcgatgagtattatcagattgcgtcttcccagttatcggagagggagttggaagacaatgtaaaggaggtgggctaatatgccaagaagaggtccaggacatggtccgatgcctggggagaaggcaaaggactttaaaggcactatgaaaaaactgatgggttatatgggaaaatataagatcgccctgctctttgtggtcatatttgccatcggcagtactgtatttaatattataggccccaagattcttggaaaggcgaccacggagatatttaccggcctggtaggcaagatatccggaggaagcggaattgactttgcaaagatcggaagaattctggcgacattgctctgcctgtacctatgcagcgccttcttctcgtttatccagggatacatcatgacaggcgtgtcccagaagctgacctaccggatgagaagggagatctccgagaagatcagccggctgccaatgaattactttgataagctgacccacggagagatcctgtcacgcatcaccaatgacgtggataccctgagcatgagcttgaaccagagcgcgacacaggtaatcacctcggtgacgacgatcatcggagtgctgatcatgatgctcagtattagcccgctgatgacggtgatcgccctcttgatccttccggtgtccatgggactgatctctgtgatcgtcaagcgctcccagaagttcttcaaaagccagcagaggtacctgggccatgtcaatgggcaggtggaagaggtgtacggcggacatagcatcgtaaaggcattcaacaaggaggaagacgtgatcgaggcatttgaccgggacaatgagatcctctaccagtctgcatggaagtcccagttcctctcaggaatgatgatgcctatcatgcagtttgttggaaatcttggctatgtggccgtagtcatccttggtggctaccttgcgatcaagaagacgatagaagtaggcgacatccagtcatttatccaatatgtaagaagctttacccagccgatccagcaggtagcgcaggtggcaaacatgcttcagtccacggcagcggcttccgagcgtgtattcgagttcctggaagagccggaagaagaccagacggtaccggatgcagtggctttggaaggcctggaagggcgtgtggaatttgaccatgtgcatttcggatacaatccggatcatatcattatcaatgatttcagcgccaaggtagagcctgggcagaagattgccatcgttgggcctaccggagccggcaagaccaccatggtcaaactgctgatgcggttctatgacgtcaacagcggcgccatcaaggtagacggccatgatatccgtgactttaaccgcagcgagctgcgccagatgttcggcatggtactgcaggatacctggctgtttaaggggagcattgaagacaatatccgctatggcaagctggacgctacccatgaagaggtggtcgaagctgccaaggctgcccatgtacaccgttttgtacagacgctgccgggaggctatagcatggagctgaacgaagaggcaagcaatgtgtcccagggacagaagcagcttctgactattgccagggcaattctggcggatccgaagattctgatccttgatgaggctaccagttccgtagatacccgtacggaagtccggattcagaaggcgatggataatttgatgcgtggcaggaccagcttcattattgcacaccgtctctcaaccatccgagacgcagacctgattctggtcatgaaggacggagacatcgtcgagcaggggactcatgaagaactgttggcaagaaacggcttctatgaggatctttataactctcagtttgaaagaagcgcataggagggcaaaattatggagcgtatagatcagcagtttgaattcttaagagagattgacaaagagaagtttattggccgccagacctatctgacagacggaaaacgtaaggaaaatgatgcggagcatgcatggcatatggcgattatgaccattcttcttggcgaatatgccaatgaagagattgacgtcttaaagacggtgaccatgctgctgatccatgacattgtggagattgacgcgggtgatacctatgcctacgatgaagagggtaaaaagacccagcgggagcgggaagagaaggcggcagagaggatattcggcctcctgccaaaagaccagtgcaggaagatgagaagcctgtgggaagaattcgaagcctgcgagacaaaagaggctaagtttgcccgtaccatggataaccttcagccggtcatgctcaatgatgctacagacggaaaagcgtgggaagagcatgacgtttggcttcagcagatactgaaccgcaaccgaaatactgcggatggctcccaaaccctgtgggagtactcccttaatcgctttatcaggccgaatgtagagaaaggccgtataaaagacagtgaaaaaaggaaggatagcatctgatctgcaatggaaacagccgcccggattcgggcggctgctcttgtgtaaggcctgctagtaaaatatgcggtccattacttcatggaaagtcctgtcaatacggattttacgtggtcgatctcctgctgtgtcgcttttgcggcagggacataataactcttttctcttgcaacctggtaaagtttttcctgagacatttcgcattcgttgcgaagctgctttaagcaggcttttaattccttgttttctgtctgtgaaatcatctcgccgtagcgtacaagttctccattgacgcctgctaaggcgtcagataccattgttttgtcatctaacatctcgcttacctcctataagaatttcatcaagtcttgcttattcttcattgcagattgtgcagcatcctggaagagtttctgcacttccggatcctgtgcctgtgaagcatagtcctgcatcttgcagtgacttgtgtcaaagccgccgatcaagtggcgtaagttctgtaagtcgagtatagatatatcagccatattcgtttcctccttttaccctttggattcaagattattttgtccctaagtcggagaaaatatactgtagattctttgcatctgcggctttttttaaaaaagcatggaacaacttctgcataggctccatggactggtacatgcattccggatgccactgtacgccgaggacgaaagggcggcttacagattctaccgcctcgatgacgccgtcagaagcgatggcagtaattttaaggtccgttcccagcgtatgaacagattggtggtggaaactattaacgcacgcggagtctccgagaatattatatagcatgctattttgtgagaccgtgattttatggctcgtgtccgcgcggctctcagataactgcatatggtttagggaggatgccggacgtaaggcaagatcctggaagatggttccgccgagagcaatattaagaatctgcatgccccggcagatgcctaggattggaagtctggtcttgagggcatattccatgaaggaaaggtggaagatatccgtacgggtatccgtcctgccacgatctgtctgtagttcttcgccgaacaggagcggacttacatcatcacctccgcagaacaggaatccgtcgcagatcttcccatagtgaggatatgcctcatcttccttggtacagggaaggatcactgggatgcctccggcatcttcaatggcactgatataagtctgcggcacgaattggcgctggtccgtggatccgcacgctacgattccgatgatagggttcatatatggctcatcctttcaaaataatgttcattttatacgcaaacggagtatacttataattgacaaatgttactatgaaagtatgaaaagaggctggtaattatgaaactaatcgatatgcactgcgatactttgtggaaattgatggatctggataagaaaggggatctgatggaaaatgcctgcagcataagcatcccttatatgaaaaaagcgcgatccaaggctcagttttttgcatgcttcacctatataaaagattatgagtccaacggagggtatgataaggcatatgaacatgtatttgagatgattgcctatatgaattcccaactggctgcgtatgatggggagatatccatggcccgttcatatgcggagatggagaataacgcagcagaaggaaggatatccgcatttctgacggtggaagaaggcggaatcctgaatgggcagatgaagcgtctggaagatctgtatggaagcggcataaggctgatgacgcttatgtggaattatgaaaactgcatcggatatcccgccagcaaggacgcatccgtgatgtggcaggggctgaagcccttcgggatagaggtggcgcgtcggatgaatgagctgggaatgatcatagatctttcccatgcgtcggatggcacgttccgcgatgtgctggaatatgcggcaaagggcccggtggtagcgtcccactccaattgccgggcaatcgcggaccatcccaggaacctgtcggatgagatgatacggaggctggcaaacgcaggaggcgttgcaggcctgaacttttatggcccgtttcttggaaacgatgaagagtcaggaattgaccagatggtggctcacattcttcatatgatccggacaggaggaagcgaattccctgcaattggaacggattttgacggttttgacggaatgaaggttatggaggttccggatatatcgcagatggaaagactatgggatgcgattaagaaggcgggcgttggggaacgtcagctggataaactatggggtggaaatgtggagcggattttaaagtacatataaagcatggcaaaggcgggcagctcgatttatgaactgcccgccttatgtatagtgggattctatttaggattatttctggcttttttcaacttcctgcatcttcagggcgcgaacctttaatggcagtccaaacagattgatgaacccttccgcatcatgatgatcgtacaattctccggtggtaaagcttgccagagactcgctgtacagggagtatggagatgtggttccagccttgatgatatttcctttataaagcttgaattttacttctccggtcacatattcctgagtgctttcaataaatgcctgcactgcctcgcgaagaggcgtgaaccattttccttcatatacgatctgactaagcttgttgcccatttcttcttttacttcataggtggcgcggtctaacaccagctcctccagctgctggtgggcctcatagagaatcgttccgccaggagtctcgtatacgccgcgggacttcatgcctacgacacggttctctacgatatcgcagataccgatgccgtgcttgccgccaagttcgtttaacttgcggatgatatcggagactttcatctcttctccattgatgctcttaggaacgcctttttcaaaggtcatggtaacatactcgccctcgtccggcgctttctcaggcgttacgcccaatacaaggagatggtcgtaatttggctcgtttgccgggtcttccagttccaggccttcatggctgatgtgccataagttacggtcacggctgtaactgtggcttgcatcgaacggaaggtcgattccgtgctgcttacagtacgcaatttcctcttcacgggaattcatggtccaaacgtccgtcattctccatggagcgatgatcttaagatcaggagcaagggctttgatgccaagctcgaaacgaatctggtcatttccttttccagtagctccgtggcagatagcgctggcgccttcctttcttgcaacctcaaccagtttcttggcgattgcgggacgtgccatggaagtacccagaagatacttgttctcgtatacagcgtgtgcctgtacgcaaggaacaacatagttgtcgcagaaatcatcgacgatgtcttctatgtataacttggatgcgccggaaagttttgcccgctcttccagcccgtctaattcttcaccctgtccgcagtctacgcagcagcagatgacttcgtaatcaaaattttcctttagccatggaataatggctgtggtatccagtccgcctgaatatgctaatacaactttctctttcatgtgtaaatcctcctaatatagaatctttatttgacttttttaaaattcataactgcatcattgtcaatcgcaaaacatactatacactattttttataaatatgcaagaataaaatgcgaaaaagtaaaaaatatacaatatatgcatgtgatttgaatataaagtaaaaaatatgcagcctttatgaataaatctccagaagaaatgtaagggcaccgcttgacatatatcgacagtctatgtattatatagatagtcgatatatagactgccaaaataaattggaaaggagaaacgatatggcgattgatagaagtctggtgtccggaagcacgtcaatgctgatattgaaactgctggaagaaaaggatatgtatggctatgagatgattgaagccttgcgtgaaaaatcgaacaacgtatttgaattgaaggcaggaaccttgtacccgcttctgcatgggatggaagaaaaaggatatcttggatcttacgaacaagaagagggagggaagatacgaaaatattatagtattacgaaagaaggaaagaagatcctgaagcagaaaaaagaagaatggatggcatattccaaggctgtcgtggatgtattgagcgtacaaggagggatggcatgaaggcggaagaatatttgaataaactgacggatcagattcgctgcgcgaaagccagggcggcgatcgctgaagagatgctgggacatattgacgagcagaagcatgcctatataagccaggggatggacgctgaggaagcggaggaggccgctgtaaaggagatgggagatccagtggaagcgggtagcctgctggatagcatccaccggcccaggatggcctggagaatgatcggcctgattggcgcgcttagcattgcaggctttataatcctgaatctgctgcaaagaaactttagcgacatgacttttgtggtgggaagcgcaatacattatggaggctgggtagttgcgggatttgtcctgatgataggggtgtgctatacagactacagcaggatcgggcgatgggcaaaggagatcatgctgggggcttttatagttctgtttctgggcgtgacagccttcgggacagcagtaaatggctctgtcaccgttatctatggatatcatgtgaatgtaaaaatgctggtattcctttttgttcccctgtatggggctgtattatgccgataccgcggagaggggaaaagagcagttgtaaaaggtcttctttggatggccccggcgcttctgatcgcccttaagatacccagtctggaagcggtgcttattctttttctggcgttcatggcagtcttgtcagttgctatatataagaactggttttgcgtatcccgcaaggcggcgcttggcattctatggctgtcagcgcttctgattccaatcctgttctgtctgcggcttcttggaagcggcccggcatatcagcgttcaaggctgcaggccatgctgcacccgggagaggcagccaaaggatcacagatatacgccataaggcagctgctgtctgacagccggcttcttggaaacgggaaccgaggatatggaaaggcagcgcggcttccagatggcagtgactatgtacttggctatgttgcgtcctgctatggaattctcatagccgtgcttcttgtaacgctgatgacggtcctgttcctgtacttcctgaaggtatcgttaaagcagaagaatcagctgggaatgatcatggggtgcggatgctctgtggtgctgttcgcccagctgctgttttatatccttattaatacgggggtgcttccggcaggaagcgtctattgtccattcataacttatggaggttatgggatgctggtgacttacgtgcttcttgggcttctgctaagcatatacaggtatcaggacgtgcctctaaaagtagagaaaactgctaggaaaagaaataaaaggaagcctgtttcagagtaaaaaattgtttaatcatgaaaaattacttgacaaagatgaaaacatgagtaaaattattagaaaatgggatactaaataacgactatacacaaaaaggagtagttattatgaaaagttcatacatcataaataatgacagcatcataaataacgcatactctgctctgccttctacagacagtgttgtttttgtgccgtgccgccccaatccccttggggtgtatttggcataaaattcaatattgtttttggaagataggatacgttgtacttgtcgctttatatttgcatagataatagacggaatatagagaaacagaagtgtggcatatgcttctgtttctttttttgcttattttgctccgatcatgcaggaaagacgacaggcatttatatgagcagaggagagaaaaatcatggactacaggcaggatttaaaagataagaaaaagattgtgatcaagatagggacgtcgaccattacctatcctgagacaggcaatatcaatctggacaagctggaaaaattcgtaaggatactgatcaatcttagaaataaaggaaaagaagtcatcgtagtgtcttccggcgccgtgggaatcggaaggaatgtgctgggcttttccgaacggccaagggagaaggcaatccgccaggcctgcgcggcggtagggcagggaaggctcatgatgatgtacgaaaaactcttcgcagagtacagccagcttacggcacaggtacttctgacgaaagagtctattaccaatgaagagtgcaagaaaaatgcgaggaatacttttgatgaattggccgcaatgagcgtggtgcctatcgtaaatgagaatgacgcgatatccgtagacgaggagttgtatggaaactttggggataatgacacaatggctgcgtatgtggcgtctctggtagatgcagaccttctgatcctgatgtcggacatcgaggggctgtatacggatgatccaaagaagaacccaaacgcacgattcgtccatacggtagggaagatagacggggaactggaaaagatggggaagggatctggaaccggacttggaaccggaggaatggcaaccaagatagaagccgcaaagatcgcgacacactccggcgcggatatggtgattgccaatggagataatatctatacgatcaatgacgtgatggcaggaaagaaagtagggacgctgttcctggcaaaggacagaggcgatatggcaggaaatgaactggcgccggttcgcgagcaattccgcaggcaggcaaagagacgtaaaaaggaaggcataaacaaagaactggcagggaatgttattggcagccagattagtacaggaggacaggcatatggattacatgcaggagattggtaggacggcaaaagaggcttcatccaaggttcaattcttaaagcagacgcagaaaaatgaaggactgtgttctgtggcaagagaactgcggatgcagacgccttttctgctcagggaaaatgcgaaagacgtggtaagagtcaaaggggaaggaatgaagccagctatgatcgaccggctgctgcttacggatcaaaggatcaatgccatggcggacgggctggagcagatagcggaactaaaggacccaatcggagagactgccaccatggaagtaaggcccaacggactgcagattggcaaaagaagggtgcctcttggagtggtggggatcatctatgaatccaggccgaatgtgactgcagatgcctttggactttgctttaagactgggaatgtggccatcttaagaggcggttcggatgcaatccgatcgaataaggcaatcataaaagtgattaaggatgggcttaagaaggagcagctgccccaggatgcggtgcttctggtggagaatacggacagagacgtggccacccagatgatgcggatgaatgagtatatcgatgtgctcatcccgcggggaggcaaggggctgatcgcaaacgtggtgaaaaacagcacggtacccgtgattgagacaggaactggcaactgccatatctacgtggacgcaacggcggatattaacatggcggtatctatcatcgacaatgcaaagacgcagcgcatgggcgtgtgcaatgcctgcgagtctctggtggtccatgaagagattgcgcctgtggcaatacctgcaatctacgaacggctgaggcagaagcaggtggaggtacgcggagatgacagggcatgccagatccaagaaggaatgatccgggcaggggaagaagactggggaatggaatatctggacgcagtcatatcccttaaggttgtctccgggattgaggaagccatttcccatatcaatcagtataataccggtcactcagagtccattattaccagggactatgccagcgcgctgaagttccaggacgagattgatgcggcagccgtatatgtcaatgcatccacgcgctttacagacgggcatgagtttggcttcggggctgagattggaatcagcacccagaaacttcacgccagagggcccatggggctggaggcgcttacaacgacaaaatacattatctttggcaatggacagatacgtccttaagcagcatatttgaattccccccaaaaaagtacttgcatattattcatattggatgtataattatgcaagtactttaattttggactgtacctggacatttgtaaaaaagtggtataatacttacaggtgcatggttataaatacattcaggaggatataaaatagatgattaaggtaggaattataggcgctacaggctatgccggcggcgaactggcaaggatattgatggggcacaaggatgcaaaaatcgtatggtatggctccagaaactacatagataagaagtacgcggatgtataccagaacatgttccagatcgtggacgccaaatgtctggatgacaatatggaggaacttgcaaagaaggcagatgtcatctttaccgccacgccgcaaggattctgcgcttccgtgatcagcgaagccatcctggctgatacgaagatcgtggacttaagcgctgattttcggatcaaggatgtggatacttatgagaagtggtatggaatccagcataaaagcccgcaatttatagaagatgccgtgtatggcctgtgcgagatcaaccgggaggatgtcaaaggcgcaaggctggttgccaatccgggctgctatacgacttgctcgatccttactgcctatccgctggccaaagaagggctgatcgatatgagtaccttgatcatagacgcaaagtccgggacatccggcgcgggaagaggcgccaaggtggggaatctctactgtgaggtaaacgagaacatcaaggcctatggagtggcaagccacaggcatacgccggagattgaggagcagctggggtatgcggcgaaggaggatgtgcggatcagttttacgccgcatcttgtccccatgaaccggggcattctggcaaccgagtatgcaacgcttacaaagcagacaacctatgaagaagtaaaggcagtctatgataaatattataaggaagagaagttcatacgcgtgctggatgaaggcatatgtccggagacaaagtgggtggaaggaagcaactacgtggacattaactttaagatagaccccaggacgaaccgcatcattatgatgggagccatcgataatctggtaaaaggagcggccggccaggcggtacagaatatgaacctgatgtttggccttccggaaagcgaaggactggaacttgttccaatgttcccatagaggtggcttatgatacggacaatgacgattgaagattacgatgaagtatatgcgctgtggaccaagatccgcgggttcgggctaagaagcgtagatgactccagagaggggatcgcgcgcttccttaagaggaatccaacaaccagcgttgtagcggtagaagatgggaaggtggttgggagcattctctgcgggcacgacggacgaaggggctgtctgtaccatgtctgcgtggatgaagattaccggaggcggggaatcggaaaatccatggtggtaaaggctatggaagagttgaaaaaagaacagatcaataaggtatgcctcatagcatttacaaaaaatgatgtgggcaataccttctggaacacgattggatgggcggagaggctggatctgaattattatgattttgtactgaatgaaaagaatattacggcatttaatgaacaataacaggccgcatataaggaggaagaaagttatggagatcataaaaggcggggttaccgcggcaaagggatttgaagcagcaagcacggcagcaggaatcaagtataaggatcggacagatatggcgctgatctacagccaggcgccttgcgtggccgctggcacatttacgaagaatgtcgtaaaggctgcgccggtcaaatgggaccagcaggtagtcggaagcggcgccaaggttcaggcggtcgtggtaaactccggaattgccaatgcatgcacaggagcagaagggtttggctattgcaaggacactgccgtggctgcggccaaggctctggatatccctgaagacggtgtgctcataggctctaccggagtcattgggaaacagatgccgattgataagctgaccgcgggcatcgatgtattggctggaaagaagaatgatacgctggagaatggcacagaggctgccaaggctatcatgacaacggatacctgcgagaaagaactggcagctgtcatagaagtaggaggcaagcaggtgaccatcggcggcatggcgaaaggctccggcatgattcaccccaatatgtgcaccatgctggcatttgttaccacggatgccgtgattgccaaggagacccttcagaaggcgttaagcggggatgtggatgatacatacaacatgatatccgtagatggggatacttctaccaatgatacggtgattctgctggcaaacgggctggcaggcaatccggagattgtgtatggaagcccggagtacgaagaattcgcgcttgcccttcatgccatcaacgagtatctggccaagaagatcgcaggggacggcgagggagccacggcgctgttcgaagtaaaggccgtaggctgcgagagcgtggagcaggccaagactcttgctaaatccatcgtatgctccaaccttaccaagacggcaatcgccggtcacgacgctaactggggaagaatcctctgcgcgatgggatattccggagcgcagtttgatccggagaaggtagatctgttctttgagagcaaggcaggaaagatccagatcatcgaaaatggaacagcagtggactacagcgaggcagaagccacgaagattctttccgagcctgaggttaccgctatcgcggatgtgaagatgggagcggaggaagcagtcgcatggggatgcgacctgacccatggctatatcgagatcaatgcagactacagaagctgatgcgaaaaataggggggcgaagatatcatgaatcaatcaatgcagaaatatctggataaggcggaggtgctgattgaagccctgccatatatccaaagattcaaccggaagatcattgtggtgaagtatggcggaagcgccatgatagatgaggaactcaaagaacatgtcatccaggatgtgactctgctgaaactggtaggattcaagccgatcatcgtacacggcggcggcaaggagataagcaagtgggttggcaaggtaggcatggagccggaattcgtcaacggactgcgggtgacggatgaagcgacgatggaactggccgagatggttctcgggaaagtaaataaaagcctggtacagctggtggaaagcctgggcgtgcgcgcgattggaatcagcggaaaagacggcggattgctgaaggtggaaaagaaactggcagatggcgaggacatcggattcgtgggggatgtcaaagaggtgaatgcagatatcctttatgaccttctggagaaggatttccttccaatcgtatgcccggtgggactggacgatgaatttaatacatataatatcaatgcggatgatgccgcgtgtgccatcgccagagcggtaaaggcggagaaactagcattccttacggatatcgagggcgtatataaggatccgaaggatccggataccctaatctcggaactgcgagtatcagcaggcaaacagctgatggaggaaggctatatcggaggcggaatgctcccgaagcttcagaactgtatcgatgccatcgagaacggcgtttccagggtgcatatcctggatggaagaattcctcactgcctgcttctcgagatattcaccaacaaaggaatcgggacggcaattttaaatgatactgaggaaaaatattatcacggagaatagaaatgaataaatatatagaagaaacaaacagtggacttgtgcacacttataatcgctttccgctggtgctggaccggggggagggagtctatctttacgatgaaaaaggcggcaaatatctggactttgcaggaggcatagctgtatccggcctgggatatggctgccaggaattaaatgatgccctgaaaagccagatagacaagatgattcacagttccaacctatactataatacgacctgcggacatgcggcagaagaactgaagcgtatcagcgggatggacagggtattctttaccaacagcgggacagaggccattgaaggcgcgctgaaggcagccaggaaatacgcgtataaaaagcagaccgggcggtatgaattcattgcaatggagaattcatttcatggcaggagcatgggcgcattgtcggtgacgggaagcgatgcttaccgggaacccttcgagccattggttccgggcgtgtcgtttgcagaattcaataaccttgacagcgtcaaggctctggtgaccagtcagacttgcgcgattatcttagagcctctccagggagaaggcggaattaatgttgccacagaagaattcatggccggaatccgaaaactttgcgacgatgaaggcatactgatgatctgcgacgagattcagtgcggcatgggacggaccggcgctatgtttgcctaccagtcttatgggactaagccggatattatcgctatggccaaggctatcggaagcggcatgccggtaggggcatttgccatgacggaagaggtggcggagttttctctggagcctggggatcatggaacgacctatgggggaaatccgctggcctgcatggcagtaagcaagacgatagaaatctttgagaagaaaaatatgatctcccatgtgcaggaaattggcgcctatctggcagaacagctggagaggctggtgcaggaaaaagactgcgtgatcgcgagaaaaggaaaaggcctgattcagggaatcgagatatcaaagcccgtaggagaagtaacaaacgccgcgcttaaggaagggcttctggttatcagcgccaggggaaacgtgatccgtctggttccgcctcttgtgatagagaagcagcatgtggatgaaatgatcgataaattgtcaaaagtgctatagacataaaaaaacaatcattggatatactatctacaggaatgtaggaggtatatctgatgattggtttttttattgcgcttttatccggggcgctgatgagcgtccagggagtatttaatacacaggttacaaagacgacaggcatgtgggtgagcaatgcatgggtgcagttgagcgcatttgcgctgtgcctggtggcatggctgatcgcggggagggatagtgttactaccctggcaaaagtagagccgaaatacgtccttttaggaggcgtcattggggcaggcattacctggaccgtaattaagagcatggagcagctggggcctgccaaagcggcacttctcatcgtcatttcacagttgatcgtcgcctatgtgatagagcttcttggcctgttcggcgtggataaggagcctttggaatggcgcaagataatcggcatggtgattgcactgattggagttgcaattttccaatggaaatagtacaataactttatctaggcataatcgggggatttgcagtttcgacagactgtaaaggagttttttatgcatagaaatagaataaaaatgatatgttttactatcggtttaatgatggcggtcctcttggccggatgttccgggaaacaggatgccaggactgtggaactgtcggaggcaaaagaaggcagcgttgccgaagaaaaagaagaagagacagaagatagcgccatcgaggaaaacgaagatatctatgtacatgtatgcggggaggtaaatcaaccgggcgtatactgcctcccggcaggcagcaggctgtatgaggcgattgaggcggctggagggcttaaggaaggtgcggcggcagaatctctgaaccaggcacaggaggccaaggatgggcagcagatttacgttccttctatagaagagtcgttaaaggaaggagtatctggagagggagaaccggctgaggcatccgatggaaagattaatcttaatacagcagccaaagagcagctgatgaccttaactggaatcggagagactaaagcagcggcaatcatccgctaccgggaagagaacggaggctttcagagcatagaggaattaatggaagtagaaggaatcaaggaaggcgtatttaacaaaatcaaagaccagatcaagatttaataagggagatatgtaatgagtagacgagtattggttgtggatgatgaaaaactaatcgtaaaaggcatccgtttcagcctggagcaggatggaatggaggttgactgcgcttatgatggggaagaggcgctgaaactggcgaaagagaatgcatatgatatgatacttctggatattatgctgccaaagcatgatggctttgaagtgtgccagcagatccgggaattttccgatgttccgattgtaatgctgactgccaggggagatgacatggataagatactgggcctggagtatggggcggatgattacataacaaagccgtttaacatcctggaagtcaaggcgcgtatcaaggcaatcatgcgacgtaccagtaagagagataaagcccagccgaatgacaagattattatcaagggagatatgaagatagactgtgaaagcagaagggtattcattggcgagaaggaaattaatctgacggccaaagagttcgacctgctggaactgctggctatgaatccgaataaggtatacagccgggagaatctgctgaatatcgtatggggctatgagtatccgggagatgcaagaacagtggacgtacatatccggaggctgcgggagaagatagagacgaatccgagcgatccgaagtacgtttatacaaaatggggagttggttattatttcaggggttaggaagtattttaaacacagggtattcaggagtctccgctttcggattatccttctggttatgctggcagggattattcccgggataatcatgaaggcggtgattctgaacagttatgagaaaagggcagtagatgtacggactgcagagatacagaatcaatgtacaattctatgtaaccagctgagtaattccagttacttggacggtattacatccgaagtgatcaaaagcgagctggttcagctgtccaatatttacaatggacgagtcatggtcatcgcaaatgatttccgaattgctgaagatacatatgatatggataagggaaagaccatcgtgtcggaagatgtcatccagtgctttcaaggaaagggcaccagtaattatgatgcaaaaaacaagtatattgaggtgacgtcgccaatcctggatggaaatacggaggatgtcaccggagtcatgctggtcagcgtttctacggataccatcgtggacagccttgccgtcctggatggaaaggcgagcattgttggcattaccataggagtggtaatcctggtgctggcatctcttgcgggggttgttatggtgaagcccttccagcgcatcacgcgttctatatcggctgtgacggaaggatacgatgacaattatctccatgaaaatgcctatactgagacacagctgatctcagacgcattcaataagatgctgggtaggatgagggttctggatgattccaggaatgaattcgtctccaatgtgtcccatgaactgaagacgcctcttacatccatgaaggtacttgcagattcccttctgtcgcaggaagatgttccggccgaattgtataaggaattcatgggagacttatccgaagagatcgagagggagaataagatcatcaatgacctgctgtctctggttaagatggacaagacggcaaatacgctgaatattaagtcggagaatatgaataccctggtagaaaagatcctgaagcggctgcgtccaatcgcggcaacccggaatattgaagtggtatttgaaagtttcaggccggtcactgcagaagtagatgagatgaagctgtctcttgcaatttccaatctggtggaaaatgccatcaagtacaataaagatgatggctggatccacgtatctttgaatgcggatcataagtattgctacatcgaggtggcggattccggaatcggaattccggaagaatcggcggaacatatcttcgagagattttaccgcgtggacaagtctcattccagggagatcggcggaaccgggctgggactggccattgcaagaagcgctgttttgatgcacagaggagccatcaaggtgtacagccagctgggggaaggaactacatttaccatacgtatcccattgacatatgtatcatagttcggaggtaagaggtatgaaaaacaaattttggtccagcctgtgcgtaacgctgtgtgtccttcttcttgccgggtgcggaaagggaaaggagccggatggctccggcacgtatctgtactatgtgaaccagaaaggcacggggctggttaaggaatcctatgagttcaaaggcgattctgtggaggatgagattaaagatgtgctgaaaacaatgaaaaaagagcccgactccatagattataaaagcgtgttccccaaagaggtacgcatcaagaactggacgctgaatgataccaagctggatcttcattttaatgggagctataaggatatgccgctggcatctgaagtgctgcttcgagcggcggtagtccagacgctggtacagattgccggcgtcgactatatagactttttcatagaggatgagccgcttacggacaggaacggaaacctgatcggatacatgcgggccgaagattttatacagaatacgggctcgtctttgcattcctatcaacagggggaactgcgcctttattttgccaatgacaagggcgataaactggtgagggaggatgtaagcgtccggtataatagtaatatctccatcgagaaactgatcgtggagcagttgataaaggggccctcatcggataagggaaagccggcgattccgccggaaacgaaagttctgggggtttcgttaaaagacagcatctgctatgtgaacctggatgaagggtttctcaacaacgcctatgtgctaaatcccaggcttacggtgtattccattgtcaattcggtgatagacggtggcaattccagcagggtacagatatccatcaatggagaatccgatatcaagtatatggacagcattgatctaagcaagcctttgtccagagacctggatattgtggaggagagtggaaaatgaaaaacaggccgctgttatgtacatgcctgatactgctggcgggggtcatcttaagcgttttcgcgggaggcagcgcgctgatccgccaactgcggccctccccgctggaaatacacgcgaagcagggagaggtgcttgccattacgggccaggcatataagattgagaaaaaagagaagcatcaggcagtctatctaaagaataattctattttacaaattcaaaaagatcagaaacagtcgtttcaagaacccaattttattctatatacagatcccgaaatacagatacatataggcaatgccataagggctacaggagaactgtcctttttccaaaatgcccgcaatccggggaactttgaccagaaactctattatcagagacaggccatacatggattggcctgggccaaagaggtggaagtcgcggacgactccgtctggaagatcagggactggctggccggattccgcagccagtggaagaaggccctgatcgaggccttgggggagaaggatggcaatgtcctaagcgcaatgatgctgggagaaaagtcggagatggatccggacacgaaggaactgtatcaggcgagcggaatcgggcatatcctggccatctccgggcttcacctgtcctttatcggtatcggagcgtaccgaatctttagaaggatgacaggctcctatacggcaggaggcattgcgggcattctgcttctggtcctatatgtcatgatgatcgggtttacggtatccgctgtccgtgccctggtcatgttcttattccgggtgggcgcggatatgacgggacgacattatgacccgcctacagcgcttgcggcagctgctgcggctgtccttttatggaggccgcttagcctgtatgacggaggcttctggctgtcctttggcgcggtatttgccgtgatcatcgtcctccccatcttcaaggggctgccggtgcaaggattctgggcaagcgtgagcatcaaccttacgatacttcctgccatgttattctatttctttgaatttccgtcctattccctactcctgaacctgttcgtaatccccttgatgtctgccatgctgttcctgggcttgctgggaagcgcggcgtacgcggcaggcattcctatagccgtctttgggcttaagatatgcaaggcaattctctggttttatgagaaatgctgtgagattggcatgggcatacccagggcgcgtatgattgcaggaaagccccggttgtggcagatcgcggcttactatatcttgctggcggcagccctggtattccttaggcggttgcgccggaaagaaaaaaagaaagcctccggaatggaaactgcgggcaggataagaatcataccattgcttgcccttgccgccggaattttcatactgacattccggttcggagaagcaggaagactgtcggtgacgatattggatgtggggcagggagacgggatattcatccaaggcccggctggcgggacctatctgattgacggaggaagcagcgatataaagaaggtagggcaataccggatagagccattcctcaaatcccgtggagtggggaagttggattatgtcctgatatcccacggtgacagcgaccatataaacggcgtggcagacctcattgagcgcagaagaatcggcatagagataggcaccctggtactgccgatgcgggaggtgtgggatgaggctctttgcagtcttgccgatatggcgggccgggcagggatacaagtggcggcaataggaccgggacaaggcatccaggagaaggatatgtccttatcctgcatacagccggcaaaaggagatgatattttgccaggcaatgaggcatccatggttctatccctctcaagcgggaagttcgatatgctgctgaccggggacgtggaaggggatggggaagaactgctgacagaacgcctgacaagaaaggagcaggcccggacttgggaggtgctgaaagtggcacaccatggatccgggaattctacgagcgaactcttccttcaaggtgttcaaccggcatttgctatcatatccgcaggggagcagaacagctatgggcatccccatcaggagacgctttctcgtcttaaggaaaggggaacgcagatttattctacccaggacaaaggcgcggttatgatagaagtcaaggatgggaaaatgaccatctactgaaaattggaaaatctggggtagaaaaatagttttcttataccagactggtagttgaatttgagggaaaaaaacagtatacttctaagaagagatgaaaacagacagataggaaaagagggaactaaaaatgacttatgaagaggtattaagcaatgccaaaacttgtatgggagaattctgtaaggcttgtccggtatgcaatggcaaggcgtgcagcaacaaagtgccgggaccgggctcaaaagggagcgggacggtggcaatccgcaactatgacaagtggcaggaactgtgtataaatatggatactatctgtgagaataaaccgctgaacctgacatctgagatctttggcagaacattcaagtatccaatctttgcggcaccgattggcgccatgaagcttcattatggagacaagtatgatgatctggaatataatgatatcctggtatcgtcctgtgcggacgcggggattgcagcatttaccggagacggaaccaatccggcggtaatggaaggcgcagccagagcaatcaagcagaaggacggaaacggcattccgaccgtaaagccatgggatatcaatacactgaaagaaaaacttgcgatgatcaaggatgcaggatcttttgcagtggctatggatattgacgcggcagggcttccattcctcaagaacctgacacctccggcaggaagcaagacagtggaagaacttcgcgagatcgtgaaggaggcagaagtgccattcatcatcaagggcatcatgacggtaaagggcgcgctgaaggcaaaagaagcaggagcggcagcgatcgtcgtatccaatcatggcgggcgcgtgctcgaccagtgcccggctacggcagaggtgctggcagagattgcagatgcagtgggaaatgatatgaagattctggtagacggcggtatccgttccggcgtggatatctttaaggcattggcgcttggcgcagatgcggtgctcattggacgtccgttcgtaaccgcggtatatggcggaggcgccgaaggggttgctgcctatacggcaaaactggcggcagaactggaagacactatggcaatgtgcggcgcgcacagcctttctgagatatcaagagatatggtaaggtaatgaaaagtttaaacgaagatattaagacaggacaattcaagccggcctacctcctctatggggaggaggcctatttaaaaaagcagtataaggataagcttacaaaagccatgcttccggaaagcgacaccgtgaactatgcttactatgaagggaaaggcacgaacccggcggaactgatcgatctggctgagacaatgccgttttttgcagaccgcaggctgatcgtggtggagaactctggcttctttaaaaacgcgactccagaacttgcggattatattaagaatatgccagagacggcatgttttatttttgtggaaagcgaagtagacaagcgtggcaagatgtacaaggccgtcaaggacaaggggcgggccgtggagatgggccgtcaggacgagaagacgcttctgtattggctggccgggatggttaaaaaggaaggaaagcagatcaaagagtccactgccaggtatctggtggccaaaaccgggacggatatggagaatctggaaaaagagatggagaaactcttttcttatacgcttggacagacggagattaccgtacaggatgtagatgagatctgcaccacgcaggttaccaataagatcttcgacatggtggaagcagtagccgcaaagcagcagaagcaggcgctggattattattatgacctgctggcgctgaaagaaccccccatgcggatcctgtatctacttgcccgccagttcaaactgctgatggaagtaaaggatttgtcgggacgcgggtatgataagccgcagatcgcgaagacggcaggccttcatccttttgttgcaggcaagtatataaaacagtgccgcagcttctccaaagaagaattaagaagcatcatggaagaagcggcgaatacggaagaaatggtgaagaccgggcggctgaacgacaggatgagcgtggaacttttcattgtaaaatatagttccccgtgatatactggacgcatggcagcgggcaggacaggcaggtgtcttcataagtatgtccgctggaacttcgagaaatatacagctaaggggaaggatataagtggcaggaatagatcaaagcagaattcgtaatttttgtattatcgcgcatatagatcatggaaaatctacgctggcagacaggattatagagaagacaggccttcttaccagcagggagatgcagtcccaggtattggataatatggaactggaacgagagcggggcattaccatcaaggcccaggctgttcgtaccgtctatcaggccaaggatggggaagaatatatcttcaatcttattgatacgccgggacatgtagattttaactatgaggtatccagaagcctggcagcctgcgacggcgccattctcgtggtggatgcggcccagggagtggaggcacagacacttgccaacgtctatctggcgctggatcacgatctggatgtcatgccggtgatcaacaaggtagatctgccaagcgcagaaccagagcgtgtcatcgaagagatcgaagacgtgatcggcattgaggcaacggatgcgccgcagatatcggcaaagacaggactgaatatagaccaggtgctggagcagatcgtggagaagatccctgcgccccagggggacccaaaagcgcctcttaaggcgctgatattcgattccctgtatgattcttacaagggcgtcattgtcttttgcaggattaaggaaggcagcgtaaagaaaggcacgccgattcagatgatggcaacaggcgcaaaggcggaagtcgtggaagtaggctacttcggggccggacagttcattccttgcgacgagttgaatgccggaatggtaggctatattactgcaagccttaagaatgtgaaggatacgcgggtaggcgataccatcacggatgcatcccggccatgcgacaagcctctgccgggctataaaaaggtcaatcccatggtgtactgcggcatgtatccggcggacggggcgaagtacccggatcttagggacgcgctggagaaactgcagctcaatgacgcatccctgcagtttgagccggagacatccatagcgctgggattcggattccgctgcggcttcctgggacttctgcatctggagattatccaggagcgtctggagagagagtataatctggatctggtaaccacggcgccgggggttatctataaagtatataagaccaacggggaagtgatcgaactgacgaatccctccaatcttcctgacccgtcggagatcgaatatatggaagagcctatggtaaaggcagagattatggtgacttccgagttcatcggcgcgatcatggatctgtgccaggagcggcgtggtatctatgaaggaatggagtatatcgaagaaacccgtgcggtgcttcggtatcatctgcccttgaatgagattatctatgacttctttgatgcactgaagtctcgttccagaggctatgcctcttttgattatgagatggacggctacgtgcagtcgaatctggtgaaactggatattctgatcaacaaggaggaggtagatgccctttcctttatcattcatgcggatacggcttatgagcggggccgcaagatgtgtgagaaactgaaggaagagattccgaggcagctcttcgagattccaatccaggcggcgatcggaagcaagattatagcaagagagacggtaaaggctatgcgaaaggatgtgcttgccaagtgctatggcggtgacatcagtcggaagcgaaaacttctggagaagcagaaggaaggcaagaagcgcatgcggcaggtaggcaacgtggagatcccgcagaaagcctttatgagcgtattaaagttggatgataaataatgagaccattagaattatatattcatattccattttgcatcagtaaatgtaaatattgtgatttcctgtccgcgccttcgaaagagggagagcggcagaagtatgtgaaaagcctttgcaagcggatccgttcttatgggacgctggcagaggcttatcatgttgtaagcatatttataggaggaggaaccccctcccttcttgatccagtacagatatctgccatatttcacgcggtccgggagacgttcatggtggacaaggatgcagagattaccattgagatgaatccgggaacggtatccccggagaagctgatagcatatcgccaggccggaatcagccgccttagcatcggtctgcagtccatccggaacgaagaattagaggtgctgggtagaatccacacatttgaggagtttcttcatacctacgagatggcaagaagagagggatttggaaatattaacattgacctgatgtccgggataccgttccaaaccctgaacggatggaaggaaagcctgaaaagggtggcagaccttgagccggagcatatctcagcctacagtctgatcatcgaagagggaactcctttctatgagcgttaccgggatgcaaggcatgaggaagaactgccggatgaggagacggagcgccagatgtatcatcataccagggaaatacttggggcgtatggctatcgaaggtatgagatatccaactacgcaaaagaaggctatgaatgcaggcacaatcttggctactggaaccggacggaatatctgggcatcggaaccggcgcagcttccttgatcggtaacaggagatggagcgaaggagaggagccggaggcattaagccgggaaaatcagatggaagagtatatgtttctgggacttcgcaagatggaaggcgttacaaagtcagaattcctgaaagaatttggctgtaccatggagagcaagtatagccatgtgcttaagcggatgtatgccgaaggcttgatggaggaatcaggggattatgtaaggcttaccgaccaggggattgatatcagcaattatgtgatgagtgaatttttgttctgatcatgagtgttctcaggatccgtaaaagaaaatgcaagataaggagacagacggatgtattttgaatatggtgatacagagattgaatacctgaaaagaaaggataagaaattaggagaagccattgatcatatcggacacatctaccgggaggtggacgcagatatcttccagtcagtagtgcaccaaatcataggccagcagatatccaatgcagctctggctaccgtgtgggggagattcaggaatatggtgggagaagtgacgccgcaggcggtcttaaagtaccaggcggaggaactaaaaggtctggggatgtcgtttagaaaggctgagtatatccggaattttgccgaaaaagtctgtcagggagaactggatttggaggagttgtgccagatggatgaccagaaggtgatcaagaccctgtcatccttgagggggattggcgtatggaccgccgagatgcttctcatcttctgcatgcagaggcctgacgtgcttagttatggagacggcgcgattctgaaaggaatgcagattctgtaccatcaccggaagatggataaaaatctgtttgagaagtaccgaaagagatacagcccatatgggtcggtggcaagcctgtacctttgggcgattgccggcggagccctggagggctgatagttgggcggctctttttgcctatatttaaattttcagaacgattccaatgactgctccggccaggatccacaaaatgggatgcagttttcccagtttctttacctgtaggagcaggaaggttccaaggcatatgacgacgctagttacgttgatatgcaaagaaccattcacggtagataccagggcgatctttaacagttcccataccgcgtagccaatcaaggcggccacggtagggcggatgccatagaatacggcctttaccgtaggattctcgctgaaattctccaggaaccttgcgatgatcacgataataatcagagcaggcgccgtcagcgccagggttgccaccagcgcgcctgggatgccggctacgctgtatccggcaaaggtagccatgttgatgcccaccgggccgggagtgctctcgctgattgccaccatgttggccagatcgctggcagtgtaccagttgtattttgtggtcaggtccataaggaatggaagggtggccatgccgcctccaatggagaacaggccgattttaaagaattcaaatgccagtgtcagataaatcatgattctttccgccccccaatctttttgatgacgactcccgcgattcccgccaggatgacgatggcggcggtaggaacgggagtgaagcatgccagcagaaatgctgcgacaaatagcagagcgcccagcttatccacgattcctttctttgccatggtgactacggtattcagcatcagcgcgcagacgatgatccgaatgcctgccagagcatgaaggacgacaggaagatggatgaagttctgcaagatggatgctgctaggcagatgatgataatggagggagagatgacgcccaaggtgccaaatacgccgcccaggaatccagcctgcctgtagcccacataggtggcagtattgacggcgataatgccgggcgtgcactgcccgatcgcgtacatatccagcagttcctcgtcggtacaccattttctggcttccaccacttccctctggagcatgggaagcatggcaagccctcctccgaacgtaaggccgccaattttaaagaaactgatatagagttcagccattttttttaatttcataataatacctcgctgcttgactttcaaagtagattagacatgatcaaggcataaacttcctgattctttttcgcccagttgttggcgatcgtctcagcctcggcctgtgtgggaacagacagcgtcagatcgatcagaggagtatcatgctcaatgacctggcagcggacagaatattccatgttggaattccggtaatagtctgacttgacggccacttcatttttcaattcatattgcttttccttcaggaaagtatcgatatcttcctgaatagcaggagagatatcatttttgaagaaatgtatcgtctgtgccccttcttccgtgaggtggtagaaggtacggctgtgggtggattcttcatgaatgaagccggagccgatcagttctgatattgcctgctggagcttaaagtaggtagtatagccctcatccaggataaattccgatatctgggaattggtcagggggaagtctaccttgttcagcatatagagtatgattagtttgtataatgtaaaagatttggccattgttacaactcctttccttgccagatgtcctgcttttttaagtatgcctgcatctggttcaatacctggcgcttattccctgtccataagggggctatcaggagtgacttgggaccgtctccggtcagccggtgtatgacgatatccgggctaagagcacacaggcattggcctaggattccaaaatactcttccatggaagggaggtagaatggatgcttttcataatagcctgcaaggtccgtattctttagtatgtgcagcagctggaacttcatgccttgtatgttctggcagttcagataccgcaccgtgcgcagcatcatttccatatcttcgccgggaaggcacaggattgtatggacaattacgtcaatgttcagcagacgcaggcgggatacggcctgctcaaataccgaaagatcatatcctctgcggatgaagcgggctgtatcaggatggattgtctggaggcctaattcaatccagacaggcttgatctggtttagttcatccagaagcttaagcacatcctctccaaggcaatccggccttgtggcaatggagagtatctttacctcgggatgcctgatagcctccatgaacatatcgcgtaaataggcaattggcgcataagtgttggtgtatgcctggaagtaggcaatataggaggtgcctggatgtttggcggcaacctgcctttttccctgctcgatctgttccgtaatggataacttgcggtcagatgcaaaatcgccagaaccgccggcgctgcagaatacgcagccccggcgtcccagcgtgccgtcacggttagggcaggtcatgcctccgtccatagagatcttatatagtttttctccataagtattcttaaggtaatgatccagagagtagtatctcttatcaccccagcgtttgaccatactaaatcagttcctttactgcctggctgacaacatctgcaacgcgcggatcaaaggcttccggcagaatgttgtcttcgtttagctcgtcttttggaatcagccccgcaatcgcctttgcggtagccagcttcatctcttctgtgatcctggtggcgcgtccttccagagcacccttaaagattccggggaatgccactacattgttgacctggttcgggaagtcggaacgacccgttcccacaacttttgcaccggcttctttggcaagatccggcatgatctccggaacgggattggccatggcaaaaagaatggaatccttattcatggaagccaccatctccttggtgacaatgttgggggcggagacgcccacgaagatgtcggcaccttccaaggcgtcgctgagagttcccttcctgccttccagattggttacctccaccatcttttcctgcatccagttcagatgcggggactccttgctgaggattccattgatatcgcacatagtgatatgcctgaagccgtaagtaagaagcagcctggtgatggcgactcctgcggaaccggcgccatttaccacgaccttggcctcttctttgttcttgcctgtgaccttcatggcattgatgatgcccgcaagaacgacgatggccgtgccgtgctggtcatcatgaaagacggggatatccagcagttcttttagacgctcttcaatctcgaagcagcggggagcgctgatgtcttccagattgatgccgccgaacgcgggggcgatgttgacgaccgtgcggatgatctcttccgtatcctgggtgtccaggcagataggaaatgcattaacgccgccaaattctttaaacagtacggcctttccttccatgaccggcatagcggcatgcgcgccgatgttgccaagtccgagcaccgcgctcccatcggagacgacggctaccgtgtttgactttatggtataggtataagcagcctctttattgttggcaatggccttgcagggttccgcaacgccaggagtgtaggcaatagacagatcctcgcgggaatgcacatgggattttgcggtcgtttcgatctttccatgccattcctcatgcattttcagtgctttttcatttgttgtcataggattaccacctcttttattttcttcttattaataagttttataagtccgtattttttataatagcattcctttagcctcaaatcaataaagtttcgggaaagttttgaggaggggcaggataagaaaagggggggcggcggaaacgggaaaacccgggattatgtcgcgattttttgtattttgtcataaaaactcggatataacatggtttaaaaagaggcgaattataaagaaatacttttaaaatcaagattattgtagtataatactttcatatttcagatgagtcaagtcagactggtgttcccgatatagataattttggtgaatatgaaaggaataaatgatgatgagagaaaagtatgaatcactgcctttagctacgttaaaagatcttgcaaaagcaagaaggctcaaaggcatatctacgatgaagaaggcagagcttattgagcgcatgctggaagaagatgagaaggaaaagcaggcttccaaggagacggtaaaagagatgtctgccaataccggagataaggagatccatgacattgacaggctggacagcggagtgatcgcccatggcatcctggaagtgcttccggacggatatggattcatcagaagcgctaactatctgccgggagagaatgacgtctatgtatccccatcccagatacgcaagttcaaccttaagacgggagacatcttggaaggccataccaggattaagacgcagcaggagaagttcagcgccctgctctatctgaccaggatcaatgagatggacccgatgaaggccatgcgccgaaccaattttgaagatatgaccccgatcttcccggatgaaaggctgcggctggagtgtggaaggacaagcaccgccatgcggatcgttgacctcctgtcgccgatcggaaagggacagaggggaatgatcgtatccccgccaaaggccggaaagacgacgttgcttaagcaggtagccctgtctgtccgtcagaacaatccggagattcatctgctgatccttcttattgacgagcggccggaagaagttacggatattaaagaagccattgagggagagaatgtggaagtcatctattctacgtttgatgaacttccggaacatcataaaagagtgtcagagatggtgatcgagcgggcgaagcgcctggtagagcacaaaaaagacgtcatgatccttttggacagcattaccaggcttgcaagggcttacaacctgacggtaccgccatcaggaagaaccttgtccggcggtcttgatcctgcggccctccatatgccgaagcggttctttggagcggcaagaaatatgcgcgagggcggaagccttaccatattggcaactgcgctggttgataccggcagcaagatggacgatgtagtgtatgaggagtttaaaggaacgggtaatatggaactggtgctggaccgtaaattgtctgaaaagcgggtgttccctgcaattgatatacccaagtcaggaaccagaagagaggacctgctgcttagcagggaagaacaggaggcagtggagaccatgcgccgggcgctgaatggtatgcgcgcggatgaagccgtggacaatatcctgaatatgtttacccggacccgcaataatgaggacctgatacaattagtaaaaaagacaaaatttatctagacaaggccgcgcttttatgatacaataacaacgctgtttagataacgaacatttatcgcacatcgtgcatgtgacaaaataaagaagaggtgaaaatcatgaaagaaggaatacatccagcatatcatcaggcaacagtaacttgtaactgtggcaacacattcgtaacaggatctacaagcgaagacatccacgtagaaatctgttccaaatgccatccgttctatacaggacagcagaaagctgctcaggctcgtggccgtgttgataagttcaataagaaatacggaatggacaaatagtttcacaagtatcgggttgaggttgtataatctcaacccttttatgttgcagaggagttctatatgaagtcatcaaatattggcggacaggccgtcttagagggaatcatgatgaagcacaaagatgcctactccgttgcagtacgcaagccggacggggagattatcgtgcagaaggatgagtaccacagcattgtgggaaagtggaagaaactgactatgattccgtttatcaggggaatatttaattttatagattctatggtgcttggcattaagaccttgacttactcagccagtttttatgaggaagaagagcaggaaaaatttacggaagcagagactttgaagaaggagaagcaggagaaatggctgatgggcggaacagtggcattttccgtggtagcagcggtagccatcttcatggtgctgccttacgttctatcctcgtttcttaagccgctcattccatcttatcacatccgcacagtgatcgaaggctttgtgagaatcgggatattcataatgtatgtgcttctgatatcaaggatggaagatatccagaggacattcatgtaccatggggcagagcataagtgtatcaactgtatcgagcatggcctgccactgacggtggaaaatgtaaggatcagttccaggcagcataagcgctgcgggaccagtttcttgttctttgtccttgcaatcagcattatccttttgctgcttgtacaagtggagtcgcccctcatgcgggtggcagtcaggattgtccttctaccggtgattgccggaatctcctatgagatactcaaactcgccgggagcagcgataacgcgctgatcaatctgtttagcaagccagggctggcaattcaaaaactgaccaccaaagagccggatgagggcatgatcgaagtggccatccaggccgtggaggcagtatttgattggagagcatatgaagaagagaactttgacatttcagcagatttatagggaagggacttccatgcttaaagaggcaggcatccgggaggcagcgctggatgcgtggtatctgctggaatttgcgactggaatctccaaggctttctattatggcgacccggataaagagataaaggaagaagaggcggcccggtatcttggttatatagagatccgcaagagccggattccattgcagcatattacgaaggaacaggcattcatgggctatcccttctatgtggatgagcatgtgctgatcccaaggcaggatacggagacgctggttgaagaagcgctcaaggtattaaagcccggcatgcaggtactggatctatgcaccggatccgggtgtatcctgataagcctgatgaagatgtgcaaggggctttatggaaccggaagcgatatatccgaagatgcgctggaagtggccaggaagaatgcctgcaggctggaggtcaatgcagcgtttataagaagcagcctgtttgagcatatcagtggaagatacgacctgatcgtatccaatcctccctatatccctacgtcggttatcgagggactccaggaggaagtaaggctttacgatcccttcattgcccttgacggcaaggaagacgggctgtatttttacagggagatcatcaaagcaggcatacgttatctcaggccggaaggatatctgatgttcgagatcgggtacgatcagggaaatgaagtggcctgccttatggagaagcagggatataggaatatactggtaaaaaaggatttggcaggtcttgaccgtgtggtttcaggcatgtacaatggagaataactgttagagaaatgttaaggaggaaatggtatgtttgacaaattagaggatttgctcattcgtttggaagaggtacttagcgaactgcaagagccgaatgtggctaatgaccagaaccggttccgcaagcttatgaaagaacagaatgaactgactcctattgttgaggcatataaggaatataaggcctgcaagcaggcgatcgaggacagccttcagatgctggaggaagagtccgatgaagagatgagggaactcgccaaggaagaactgaatgactcaaaagcaagggttgaggaattagagcatgaacttaagattctgcttctgcccaaggaccccaatgatgataagaatgtcatagtcgagatccgtgccggcgccggcggggatgaggcggccttgttcgcggccgagatctaccgcatgtatcttcactatgcagagagccagcgatggaaagtagaactggtggaatgcgaagagatcggtataggcggcatgaagaatgtgactttcatgattaacggaaagggagcatattccgtgatgaaatacgaatccggggtacatcgggtgcagcgggtacccgagacagagtccggcggacgtatccatacttccacgattacggttgctgtcatgccggaagcggaggatgtagatatccagattgatgaaaaagatatccgcatcgacgtcatgcgggcatccggcaacggcggacagtgcgtcaatacgacagattcggcagtgcgcctgacccattatccaacaggaatcgtgatctacagccagacggagaaatcccagctgcagaataaggaaaaggcattcgcccttctccgggcaaaactgtatgatatggaatgccagaagcgccatgacgcagaagctgaggcgagaaagagccagattggtaccggagaccgttctgaaaagatccgtacttacaatttcccgcagggacgcgtgacggatcaccgtatcggcctgacattatataaactggataagatcatgaacggtgacatccaggagattattgatgcctgcatcgcagcagaccaggcagcaaaacttgcaaatatgaatgagtaaggcaagacaggaaaaggccatgagagaaaattggaaagattcaaagaaggtaaaatatgaaggaaatacagtttaaacgagcagaattagaagataaggaagttatttctcattattttaagcaccataccagcagaagctgcgagaggacatttgccaatgtgtatttgtggtccaggcagtatcctgtcaagtgggcaattgtggaggacgcgctggtattcaaaagcgaggatgagaatcatctggcatttgcctacccggccggagaaccggaaaatgtgaaaaaggcgctggaagtacttatggagtacagtaaagaaaggggcgtttccttccagatgtataatgtaacgccggataattttgatatgctggaagaatggtatccgggaagattccagatcgagtataatagggatctggcggactacgtatatgaggcagagaaactggcaacgctctccggcaagaaactgcacggaaagaggaaccacatcaataaattcaagacgatgtatgagggacgctggtcctatgagagcgtgaccaaggagaatctggaagattgcttccagatggctcttaagtggcgcaaccagaacgggtgcgaggatgatcctgagaaaagaggcgaaatctgcgtaacgctgaacgcgcttcgtctgtttgaagaattggaacttgtaggaggcattcttaaggtagatggagagatcatagctttcacacttggggagccggtctgttccgatacgtttgtggtccatatcgagaaagcatttgccgagatccagggcgcatatcctatgatcaaccagcagtttgtggaacatgagtgccaggaatatacgtatgtgaaccgggaagaagatacaggtgcggaaggccttagaaaggccaaattatcctaccgcccggttttcatggtcgaaaaaggaagagtaactgagcgtgcatagagaatagagaaaggagaaaggattatgatagcagagaaaatgaagaacatggtagcaaatagttccgccatccgggcaatgttcgaagaaggcaatcgtcttgcgggcatctatggagcggaaaatgtatatgacttcagcctgggcaatccgaatgtggctgcgccggaagcggtgaaaaaggccattatcgaattgctggatgaagatgatccggtcgtgcttcatggctatacgaacagcaatgccggctatgcagacgtgagggagactgtggcggagtcgctgaacgaacgctttggtactagttttgagggcaagaatatcgtgatgacagttggcgccgcaggaggcctgaatgtaatacttaagaccttgctgaatccgggggatgaagtaatcgcatttgctccatattttggagaataccgttcttataccaataattatgacggggtgatcgtagagatctctccgaatacgacggattttcagccgaagttggacgagttcgaaataaagatcacgccaaagaccaaggctgtcatcgtgaatacgccaaacaaccctaccggcgtagtttattccgaagaaaccattaagaagatggctgctatcatggaggcaaagcagaaagagtacggcacagatatttatctcatcgcagatgagccttaccgcgagcttgtctatgacgggacagaggttccttaccttacaaagtattatgacaatacgatcgtaggctattcttacagcaagtccctgtcgcttccgggagagcgtatcggatatctggtcatcccggacgaagtggaagacagcgagacgatactgtccgcggcaggcgttgccacccgcatccttgggtttgtaaacgcgccgaccctgcagcagaaggtggtggcgaagtgcatcaatgagaagacggatctctcttactatgacaggaacagggaggctctgtacaatggcctgaaggagtgcggatttgaatgcatcaagcctcagggggcattctatctgttcgtaaagtctccggttgcggatgaaaaggagttctgcgcggctgccaagaagtataatatcctgatcgtgccgggaagttcctttgcgtgtcccggatatgtgagaattgcgtactgcgtatcctacggcacgatcgtaaacgcccttccaaagtttaaggaactggcaaaagagtatttctagagggatgagtcatgaaggcatttgaaaagaacatacgaaaagttgagccttacgttcccggggagcagccccagcgcaaggtgattaagctgaacaccaacgaaaatccatatcctccggcacccggggttgcgaaagccttaaaagggatggagactgaccggctccgcctgtatccggatccggcagcgacgcctctggtggaggaacttgccagattctaccaggtgcagcctgatcaggtatttgtaggagtggggtcagatgacgtgctgtccatgtgcttcctgacattttttaattccaagaagccgctgctgtttcctgacgttacctattccttttacaaggtatgggcaaaattataccggattccgtacgaatgccaggaactggatgaggacttccatatagtgaaagaggattattataaggagaacgggggagtaatcttcccgaatcccaacgccccaaccgccatctatgaagaactggatgtggtggaggatatcatcgcccataaccaggatgtcatcgtcattgtggatgaggcatatatcgactttgccggacggtccgcactggaattgattgataagtatgagaatctcctggtcgtgcagacattttcaaaagcccgctccatggctgggatgcggatcggatatgccatcggcaatccggtgctgatccaatatctcaatgatgcgaaatattcctttaattcttatacgatgaaccagacatcgctggcctgcggagtcgaggcagtcaaggatgtccggtattttgaagaaggaatccaaaagatcattaggactagggaatgggcaaaggaagaactggagaaacttggttttaagtgcctggaatctcaggcaaacttcatatttgccatgcatccggaatatgatgcaaaggaaatgtttgaagcattaaaagcgaacgatatctatgtccgctattggggaagcaaacggatcaagcagtatatgcggataacgataggaaccagggaagagatggaagccttgtttgcttttcttagaaaatatatgaacaaataaaggagaattctatgactgaaactttagtgcaaagcattatcgatgcccttggcggaagtgttggaaaggaagcgatcgtatttatcatatccatgataccgatcctggaacttcgaggcggcctgcttgtggcaggcccattgcttggcgtgccggtatcgacggcaattccgctatgtattatcggcaacattattccggtgccgtttatcctgctcttgatcactcccatctttaaatggatgaaggggacgaagacatttaagccgatggtagataaactggaggcaaaggcaatgagtaagagcgataagatagagaaatacgagttctggggactggtgctgtttgttggaatcccactgcccgggacaggggcctggacaggatccctgatcgcagccctccttggcgtgaagtttaagaaggcatttccggcagtgatacttggaatctgtatagcaactgtcatcatgtggttcatatcctatgttatcctgggcggtgtccatgtgatcccatagaaattggaaatataaaagagaagcgttggcttctcttttgctatttggcgaatgcgccaggaactttgcaacgcattttcgggcactttaaaaattactcatagtgtggtaaaatgtttaaaaatgtttggataaggagtatagggtatggaaagattatatgatgtaactgcaatgggcgagatgttgattgactttacattgaatggacaaagcgagcaggggaatcatctgtttgaggcatgtccgggaggcgcgccatgcaatgtactggcgatgctcaataaattaggacgtaagaccgcctttatcggcaaggtgggtgaggatcagttcggacgccttctaaaaggaacgattgatgaactgggaatagagaccaaggggctgattctggacaaggagattcatacgacgctggcgtttgtacatactttcccggatggggacagggagttttctttctaccgcaagccaggggcagatatgatgctgacagaagaggaggtggattatgacttgatccgccagtccaggatcttccatttcggaaccctttctatgacagacgagcctgttaggtctgcgacaaagaaagcgctggaggtagcaaaagaagcagactgcctgatcacctttgatccgaacttgcgccctccgctttggaattccctggacgaggccaagaagcagatggagtatggattccaatactgtgatatgctgaagatctctgacaacgagatccagttcgtatcaggcaaggaagattacgatgaaggaatctgctatcttcaggacaaatacaacattccccttatcttcctgaccatgggaaaggatggaagccgtgcatattacaaggatatacgggtggagagaaagggattccaggtaaaggccattgagaccaccggcgccggggatacgttctgtggctgttctattcacgggcttctgacccatgggctggaagggctcacagaagagatccttggggatatgctgacttacgcgaatgcaggagcggcgcttatcaccatgaagaaaggcgcgatccgctctatgccggagccggaaaatataacaaaattaatcgaggaaaaataaaaatatgagactacgcagaatgctggccatttgggcggccaagattaccgagaaaatcagcgtccatgtattccatcgccagggtgtgacatgggcaggaaaaatcgctttaaagatatgcccaactatactgaaagaactggcaggacaggtaaagaaggatatctttatcgtctgcggcaccaatggaaagacgaccaccaacaatatgctttgcgcagccatagaagctgaaggataccgcgtcatctgcaaccacacaggctccaacatgctcaacggcgtggttgcggcttttgtgctgggggccgggaacggaggaagccttcatgctgactatgcctgcatcgaggtagacgaggcatccaccagaagggtttttccccactttaagccggattatatggtgctggccaatctattcagagaccagctggacaggtatggggagattgatattactatgaatatcctgaaaggcgtcatgcaggatgctccggatatgaaggtgattgtcaatggagacgacgccctgtccgcatatctggcgatggacagcggcaatccttatatcacttatggcatcagcgagaaggtggttgaagatgaggattccagagagatccgggaagggcgcttttgcaagcgctgcggcgcgcctcttcaatatcgtttctaccattacagccagttgggcgattatgcctgcaccgggtgtgattttaagcgtccgcagatagactttgacgcttcggaagttgaagttggcaccagattggcgtttacggtggaaggacgaaggattgaggcgaattacaaggggttctataatgtttataacatactggcggcatatgcggcagccaggacaggcggccttgcactggaacacttcaatgagatgctgttaagattcaatccagagaacggacgtatggagcagttccaggtaaaagatacgaagatactgctgaatcttgccaagaatccggcaggctttaaccagaacatatctgccgtgatgcaggatgaggctctcaaggatattattatcgtaatcaatgataacgcgcaggacggaaccgatatatcctggctgtgggatgtggactttgaccggtttaagaatgacagcataagttccatcacagtcagcggaatccggtgccaggacatgcggctgcgcttgaaatatgtagacatcccgaccgcgcttgaggcagacgtagaaaaggctgtccgcgggcgcatagaagatggatgcggcaacctgtatgttcttgtgaactataccgcgttatttagcacccggaatgtattaaagagattggagggggagaagtgatggatacgacagacatgaagataacgatcgggcatctctatcctgaccttctgaacctgtatggggatagaggcaatatcgcctgcatgatgaagcgctgccagtggcggggcattgaggcggagatgatcgaattcaatacgggcgatgagattgatttttgcggactggatattgtgctgcttggcggcggctcagacagggagcaggcgatcgtatgccagaatctcctgaagatacagaaacagtttcaagagtatgtagaagataatggagtcgttattgccgtatgcggcggataccagctgctgggaagatactataagacggatgacggcatgatagaaggtttgaacctggtggatatctatactgagcaggaggaaggaaggctgattgacaatattgtgcttcaaagcgagttagcggatatgccgatagttggatttgagaatcacggcgggcgaacctacattaatgataacaagccgtttggcaaagtattatatggttccggcaatgatgggaaaagcggatatgagggagtggtatataagaatgtgataggtacttacctgcacggcccattgcttcccaaaaatccgcagatctgtgattacctgattcagagagcattggagagaaagtatgggccgatgacgcttttaccattggatgacagccaggagcaggaggctaacgagtatatataccgcagatttgtgaaagaatagatgagatgttaggtggcttcttgttctcggtcacgtaattctagaagatgaatatattccagcagatctttctgggaacgggaagaaagcatcttatacttatacaggaggttctgttccatgggaggcagattatcattctgcaccaaagccatgtggatgacctcgtcatcttccaggagatagtcgattgttacgtggaagagattggcaagggctgccagtttctcatgcgatggctgtcggttcttcgtctcatatccggctatggttgaacgtgcgacgttcaagcggctagcaacatagtcttgtgtcatttcgttttctagacgtaacgtttttaactttttggaaaaagacatggccggcacctccttagtttttttgttaattttatcaattgttgcagtaaagaacataaaaagtgccgaatatcaacaaagtgttgcgttaggttgcaaagtggaacaatgttgagcaaaagtaaagaaatagaaaggaataggcaataaatgaggcaggaaagattcaaaatggagagagaaggcttggttaaagagggacaggaagtagaaattagcgagcggagtgccgtgacaggacagtatacatatctggttgaaccttcgattgccatgtccggaatataccggaccagccagagaatcaaatcccgcaaaggaaggatcaaaaagatcgagaagacagagaaaggattctacctgctggtagacatagatgagtaatgggaagtaccccgttgacaccagggggcaaagaacatataatttaaagtgaagcaaataatgtaagactcgaaaggaactggatagatgataatagcgaagaatgatgaagcgaaaagaagtaagatctggaggattgtcacacttgtctcatctgtcctgattatagttatagcgatttttcttctgacaaaactcttcacagccaatccgctggaaggaacatgggtggacgaagacagaagtcttaggctgtcaataaagagcaatggaacgatcgacgtgagtgttccggaggttgctgaagatgtcagcgtgggcgtgaagttgaattatacgatggacaaagaagaaaagaccattacaattaaggcggatgagtcggaatttaagaaaattgcagaaaagtctgatggaaagtatacgcaggaggacttgaagaatgccctggattccgtgactacgacatttgactacagcgtggatcaggagcaattgacgctgacagaacgcgaatatggagaacagatgacctttataaaagaatagcaatgatatgcccctctatttgagacaccgatcagacaaggtgaccgatagaggggttctactgttcgcaggatactgtattatggaaaggataaagccaatgtttagagacaagacgaaaaaggtttggataggagatgtgtgcataggcggggggagcccggttgccatccagtctatgacgaataccaggacggaggatgtggaggcgacggtggcccagattcttgaactggagagggcgggatgccagattatccgctgcgcggttccgacgatggaggcagcgcaggcgcttgcaaagatcaagaagaagattcatattccgctggtggcggatattcattttgactaccgcctggcaattgcggcaattgagaatggcgcagacaagatcaggatcaaccctggaaatatcggggccagagaacgcgtacaggcagtggtggataaggcaaaggaacaccaggtgcctgtccgcgtcggcgtaaacagcggctctcttgagaagcctctggtagaaaagtataaaggcgtgacggcggaaggcctggttgagagcgccatggacaaggtgcacatgatagaagagatgggatatgacaatctggtggtaagcatcaagtcttccgatgttatgatgtgcgtcaaagcccatgaattaattgcagataggtgtcagtatccgctgcacgtagggatcacagagtcagggaccctgctggcaggcaacatcaagtcttccataggcctggggctgatactgaaccagggaatcggagataccatccgggtatccttaaccggagatccagttgaagagatcaagtctgccaaactgatacttaagacgctgggccttagaaaaggcggcatcgaagtggtatcctgcccgacttgcggcaggactaagatcgacctgatcgggctggcaaaccaggtagagcagatggcggcggatattccgctggatatcaaagtggcggtaatgggctgcgttgtcaacgggccaggagaagccaaggaggcggatatcggtatagccggcggcataggagagggcctgctgatcaaaaagggacaggtcgtaaagaaagtaaaagaggatcaattgttagaaacgttgagacaggagttggtgcgctggaatgagtaagccgttctttgaagtatttccaacattaaaagtaaatgaagatatccgcatgctgtttgaaggcgtggaagtaacgaaagttgcgaccaattccgaccgggattttatcaaggtgcatctttacagccgccatctgatccagaaaaggcgtatctacgaagtagagaggctgctgaaggatcagctgttcggacgcagccgcatccagatcgaagtgaaggaaaggtatgaactgtcagagcagtatacgcctgagaacctgatgaatgaatattttgacagccttctgctggaactgaatgaaaaaagcgtggtggagcgcagcatgctccaaggctcaaggtatcagttcgaagaggggaatatcctttgcctgacgcttactgacaccatagtagcccaagggaagaaagaatccctgtccggttatctggcagaagtatttcaggaaagattccagaggcccattgaagtacgggtcacatatgagaagcccaaggatagcaagttaagatataatgatgtcaaactcaagcaggaagtagacgccatactggaacatgcagaagcagttcaggaggagaaggaacttaagaagaaggcccaggatgaaaaggaaggcgcttcttcaaagcccacgaagagccagaatggaaatggcgcgggcaaaaaggaaaagaaggcgttcttcgggaatggcagaagggatggattctcttataagaagaattccaatgatccgaacctgatctttggacgagattttgatgatgagacgatagaactaaagcaggtagttggcgagatgggtgagattaccatccgcggcaaggtcatcagttttgacacccgggagatccgtaacgagaagacaatcatcatgtatgcggtgacagactttacagatacgatcatggtcaagatgtttgtgcgaaacgagcagctgccggatattctggcagacgtaaagaaaggcgcgttccttaagatcaagggagtcaccaccattgataaatttgacggggaacttaccattgggtcgatcacaggaatccgaaagattaatgattttacggagtccaggaaggatacggctccggaaaagagggtagagcttcattgccatacgaagatgagcgatatggatggcgtatcggaagtaaaggatcttgtaaaacgtgcccatgactggggacacaaggcgattgccattactgaccacggagtagtccaggcattcccggacgccaaccattacatcgagaccctggataaggacgatccttttaaggtgatctacggagtagaaggctatctggtagatgaccttacggatgtggccttgggtgaaaaggggcagaccctggacgatgtctatgtagtattcgatctggagacgacgggctttagtccgattaaggataagattattgagataggcgcggtgaaggtagagaacgggaagataacagagcggttcagtacatttgtgaatcccaagattccaatcccgtttcgtattacccagctgaccagcattacggatcagatggtcatggatgcgccggatattgatacggtgctcccacaattcttggaattcattggggacgcagttctggtagcgcataatgcgtctttcgacgtgggatttatcgagcagaattgcagataccaggatattgtgccgaattttacttctgtggatacggtggccatggccagaatccttcttcctacattgtcgaagtttaagctcaatgtagtagccaacgcactccatatatccctggagaaccatcaccgggcagtggacgacgcaggcgccaccgcggagatcttcgtgaagttcgtggagatgctgaaggaacgcaatatcaatgatctggcaaggttaaaccagtttggcagcaataatgcggatgcgatcaagaagcttcccacataccatgtgatcatactggctctgaatgaagtaggccgggtgaatctatataccctgatatccaagtctcatctggattattatgccaggcggcccagaatccccaagagcgagctgtccaaatacagggaaggactgatggtaggcagcgcctgcgaggcgggagaactgtatcaggctatcctgaacgaaaagtcggaagaacggatcgcgaggatcgttaatttctatgattatctggagatacagccattgggaaataaccgatttatgattgccagcgaccgtattgagaatgtacagagtgaagaagatcttaagaagatcaacaagaagatcgtggatctgggagaccgattcaacaagccggtggtaggtacctgcgatgtgcattttatggatccggaagatgaagtctaccggcgcatcatcatggcaggaaaaggcttcggggatgcggacgagcaggcgccactctatctgcgcaccaccgacgagatgttagaagagtttgaatatctgggttcgacaaaagcaaaggagatcgtgatagacaatccctgtaagattgcggatatggcagaaaagattacgccggtaaggccggacaagtgcccgcccgtaattcccgattccgataagatgctgagggagatctgctacaataaggcccactccatgtacggggaagagctgccgccgattgttacggagcgtctggagagggaactgaattccatcatctccaacggcttcgcagtaatgtacattatagcgcagaaactggtgtggaagtccaatgaggatggctatctggttggatcccgtggctccgtaggatcttccttcgtggcgactatggcgggaattaccgaggtaaatcccttgagccctcattactactgcaagcattgccattacagcgacttcgagtctgaagaagtgcgggcatttgccggcggctgcggatgggatatgccggataagaactgccccgtctgcggggagaagctggttaaggacggattcgatattcctttcgagacgttccttgggttcaaggggaacaaggagccggatattgaccttaacttctctggcgactatcaaagtaacgcccacaagtatacggaggtcatctttggcgcaggccagacataccgtgcaggcacggtaggaacattggcagataagacggcgttcggctatgtgaagaattactatgaggagcgggggcagcggaagagaaactgcgagattgaccggattgtccaggggtgtactggaatccgaaggagtaccggacagcatccgggaggcatcattgtgcttcctctgggggaagagattaattcatttactccggtacagcatccggccaatgatatgacgacggacatcgtcaccacccactttgactaccattccattgatcacaatctgctgaaacttgacatcctgggccatgatgatccgaccatgatcaagacgctggaagagtacatcagttctccagcgctggaaaatgaatacaatgagtcggacaaccgattcgtggcaaccaagattcctctggacgacaagggggtaatgtccttgtttcatgatacgtcggccctgggaatcaagccggatgacattggcggctgcccggtgggatgccttggcatcccggaattcggaacggactttgtcgtacagatggtggttgatacccagccaaagaccttgtctgacttgatccgtatctccggtctgtcccatggcacggacgtgtggcttaacaacgcccaggaattgatcaagagcggaaaggctaccatatcaacggcaatctgtacccgcgatgatatcatgacctacctgatcaataaagggatggacagtgaattatcctttaccattatggaaaaagtaagaaaaggaaaagggcttacagacgatttcgagaaatccatgaaggaggccggagtccctgactggtatatctggtcttgcaagcagatcaagtatatgttcccgaaggcccatgcggcggcctacgttatgatggcgtaccggatcgcttactgcaagatcaattatccgctggcctattatggggcgtattttggaatccgcgcggacgcgttctcctatgagatcatgtgccgaggcaaggatgtgctgcagcattatatcgatgaatataacagccggtctgcgactctgagcaagaaggaacaggacacgatgaaagatatgaagattgtccaggagatgtatgccagagggtatgaatttatgcccatggacatctacaaggctcaggcgaccaagttcctgattattgacgggaaactgatgccgcccctttcaagcattgacggaatgggagaaaaggcggcagaagcggtggcggaagcgtccaaggacgggccatatctgtcaagggacgacttccggcagcgtaccaaagccagcaagtcggtcattgactatatggtggaactgggcatactgtccgacttgccggaatccaatcagctgtcgctgtttgacttctagcgtgccggaatccgaagtgactgtgcggtatgatagaagaaaaataagaaataagaaatgagaggaaaaccaaatgtggctactatatgctgtgggctcttcgttttttgcagggattactgcgatccttgtgaaaatcggagtggaagatacggactcccacttgctgactgcgcttaggacgatcgtagtattaatattttcctggattatggtatttgtcgttggatcccagggaaccatctcagaggtatcgccaaagacgctgctattcttgtgcgcgtccggaattactaccggggcatcctggatctgctattttcacgcattgcagatcggagatgtcaataaggtggtgcccatcgacaagtccagcgtagtgctgacgattcttctgggcgtcctgttcctgggggagcccatgagcgtgtcaaagggaatctgcgttatactgattgccgcgggaacctatctgatgatcgagaagaagcaagggacggaagaaggaaagaaaaagagcaaaagcgccattctatatgccctgctgtcggctgtctttgcgtcgctgacagcactgcttagcaaaattggcattgtagggatagaatccaatcttggcacggctatacgtaccattatcgttctgatcatggcgtggctgatcgtggtggcgggaggaaagcagaagcagatcaaggatgtaagcaggaaaagctggacttttatcatcctatccggaatcgctaccggcctgtcgtggctatgctattaccgggccttgcaggatgggccgatcagcgtagtgctgccgattgacaagttaagcatcctgatatccatcgcttttgcatatattatatttaaggaacggcttacgaggaaatcaggcctgggacttgccatgattgtagccgggacactggggatggtggtgctatgagtggcagcaggcgttataaaggaatcttatacattatcctgtccgcattctgcttcgcgcttatgaaccttttcgtccgcctggcaggcgatttgccttcaatccagaaaagtttcttccgtaactttgttgcggcaatttttgcatgcatgatccttttaaaagatggcgtgccgtttcggtgcaggaaggagaatctaaagtttatgcttctgcgctccgtcttcgggacgcttggaattctttgcaatttctatgcagtggatcatctggtgcttgcagatgcgtccatgctaaataagatgtctccattttttgcggtgctatttagtttcctgattttaaaagagcaggtgaaggtaccccaggcattgatggtggcaggcgcatttgcaggaagcatgttcgttgtaaagccgacgcttacgaatatggatcttgtcccatccatgatcgggcttctcggcggaattggcgcaggcgcggcttatacgatggtcagaaaactgggagagaatggggaaaaaggcccgtttatcgtgttcttcttctcgacgttctcatgcttattcaccttgccttggctgatctttgactatcatcctatgtccctgtcccagaccgctacccttctaatggctggtattgcggcggcaggagggcagttctccataaccgcggcctattgccatgcgccggcaagggagatctccgtctatgattattcgcagattatcttctcggctggattgggatttgtcatattcggacaggttccggatgcttttagctgggttggatatggaattatatgtacgatggcagtactgatgtttttatataacataagaaaccaatagcctcttttctgtatacactataagtgaaaacagaaatagaggctattattatgaaattaagatactgcaataagaatcaggaatgcattgacttttttgcacaatatgggacaagttccaatccggcaagtggaagttttatcccggatgcgcgtttaggctggctaaaaaaagtggtgaaagagcagtttgtgcatatactatttcaaaagactaaattataaggtatgcaaaaatatgaatcaatatgtgacattatcattagagtcccacttattttttggaagaattatgaaagagcacgcgctatttctaatggcaggatttcctgcaaagaatgaggcgttcattgagaaggcggattggtatcgtgcccagtttgaagacttgctggcacaggccgtaaaaatcagcaatgggactataaggcaaggcgtgctgaagtcaggagaaatatttaccgaatatacaataaaagccgaaaaaagcacgagttgccttacgggaatttctattgatacttgcattacagaagatgagatgaagttggtgccaggtgacaaaatgaccttgaacagggaacagagccagttgatggcaaggcgggtgaggatgctgaatgaaagagcgctggaactggtaaccggcctgatctgcctaaaggaagagatattggaagccatgacaaagtgtaagatatataatagcaattatccgttattgatccggcatatcataagagaggccaaactatacaaggaaacgattacggaactcaataccaaaggctatatctgttccagaaatctaaaagctatagaaaaattctggaatcagatcatgatggaacatgcgctatttatccgcgggcttctggatccttcggaagaagagttgattgaggctgccgatgcatttgcaggagattataagaaattgattcgagaggcccgggaaatggactgtaggacgatggacggactgacaagaaggacgatagaggagacagtacggtaccgggagtttaaggcagcaggaacaaagggaattacggaatgcaggattgagtcgatcatacttcctttgctggcggatcatgttctaagggaagcaagccactatctgcgcatcctgcaatcggaagcaaaacggtaagacttcctccatgatacatgattatgtgtcgaaagagcagacggcaagggcggtattaataagacaaaagcgtgacaggatcgcccatctgaatgccaagttctccattcaggctgataagcgcgataccgaggattgcgataaatgcagccaggccatcctttttcagtggcctggcttttgtgatggaccatgctgcaagcggcgtaaagatgacataggtggctgcaagaaatgactgcttggcaggagtcgtgtactgaaggccaaacagctggatcagaagccccagaaattggaggatgccaagcaaaaggccatattttataattcttctttcagccagacgggtcctcctgttaaatatcaggcccatgatgatcgctgtgccacagaagcggtacataagaattgcaagagggccaagcccctttagggcatattttccggcaacaaatccgcctccccagattgcggcaacgataaaaagcgtcatatcggcaagtaagagcgtcgttttatttgatagggtcttcatagaatatacctcctttggaaattgagttgaatatatcataaacaaatgccaaaatcaatataactaatgaatttaaatatatctaaatagtgtttgctttttctatgaatattgataggaaaatcgaaggtgacggaaaggagaacagagaaatggaaaaaacataccaaattggctccaggctgtcaggctaccggaaggcgcatgggctgacaataaaggaattggctgtaaaaacggggcttagtactgcgcttttaagcgagcttgagcgtgggattgggaaccccacgctctcggtgctgaagattctggctggtacgatggggatatcggtatccgcgctgctggagcaggaagttaagaatgcgtccctggtaagaagaaggtgcgagcggagccagacaggaggacctgacgcaagatgtctctatgatgttttggcagtcagtccggtaaagtccaggatggaactgcttcttctggaacttgagcccggaatgtactccaatgataggcttagcgtgcatccttattgggaggagatcgcttatgtagtctccggtacggtagagatcttattcgaagaagaggagattgagcttagggaaggagataccatccgtatacttcccgggagaggccatcgttttatgaatcagacagatgaaagggctatggtactattcgcacaggaaagccggtagaattcatttgcaaatatgagcggaagtacttgacacttaactatcttgtgatacaatatagttaagaacattgcaatgcaaggtagtggaaggcgggatgacgatggatagatcacagctaatgaaaggcatactggaaggctgtatattgaagatcatcagccagtcagagacctacggctatgagattgtagaccggctgcaggagaatgggttccgggaggtaaaggaaggaacgctgtatccgcttctcttacgcctggagaagaagaagctgattcaggcgacctacaagccaagtcccttaggcccaagccgcaagtactattccctgactggagaaggagaagaatacgtagcggcattctacggaaactggaaggaaatctgcgaatcggtaaagaagatatttgaggaggggttgatatgaagatcatggaaaacaagctgaaacagctggagaaggagaatgaagatgatttctaccgtatccggtcagaagaaagacgaaaagaagtatcccagatggtcaaatatatctcttcctcctcactgcccctctaccagatccagattatccgaaaggatctgctggggatggcgcaggaggcggagcgccaggaactgccgctaaaggatatgctgggcgtagagccccgggaattctgcgatgagataatcgagaatgccggaacgccagccaggaaggagcgggcgtttcaggcagtgatagatgtcctgcagccttttgcgatctatttcacttttatctggacttgcggcgggatgccttccagattcgggattacgctgtcggatatcattgcatttctgggcttgtgcggcatctgcagaggcctgatgcgctatatgggcaaccggctggcaatcaagggaagacctatcctgaatctgctgccctatctgttttttgcctgtatggtagccttgatcgtcatcggagggcgttcggttttaggccttgtcggaggaaggtatgtgatatcaggcccaggccttttcatggtcatcctggtggatgtgattgccataggagcaacgtttttatggaacaggtattggaataaatttcctaagtagatagtatattccacaattttacaattctaaataaaaacacgacacaatgctgtcgtgtttttatgttatagtaatagcagataagtaacggggaggaagacgatgaagattgacagactgattgggatattatcaatattgctgcagcaggagcgggtgacggctccttatcttgcagagcggttcgaggtctccaggcgtacgatcaacagggatatcgaagacttgtgcaaggccggaattccgctagtgaccgtgcagggcgcaaatggcggcatatcaatcatggaaggatacaggctgaatcggacccttcttacatcttcggatatgcaggcgatccttgccgggcttcgcagcctggacagcgtatccggtaccagcaggtatcagcagctgatggataagctggaggtgaatcatacgacgcttgcttccaacagccatattctgatcgacctgtcctcctactacaagtccaccctggcgccgaagatcgaattgatccaggatgccattgagggaagacattatatccagtttgactattatgcgccaggcggggagggcggtcggttgatcgagccttatcttttggtcttccagtgggcctcctggtatgtgtggggatggtgcacgaagcgggaagattaccggctgttcaagttaaaccggatgctggaattaaaggtcgcaggagagcagtttgaagaacgcgatcttcccaagtacgagccaaaggtggaggcggcatatccttttgaaatctcggtgtcggccgtgttcgagccggagatgaagtggaggctgatcgaagaatatggcgtggacagtttcagaatcagggaggatgggaagctgcagtttcaattttattttcatgacaaggagaatctgtttagttggctgcttacattcggcgataaggtggaattattagagccggaaggccttcgggaggaaatccggctgctggcagaaaatatcggcaaaaagtataagaagaattagaaacatgacacataggtgtcgtgttaggcgtgatatgcttgtcataaataaagaaagcaagaggaaaacagcatggattatgaaatagtagaattgaaagaaaagacggtagcggggcttgcggccagaaccaacaatctgtctcctgaaatgggagcagtgattggagggctttggaaacagttttatggagaaggaatctatggacagttaaagcacaaggtcagtggaaaagcaatgggaatctactccgactatgccggggatgagaccggggattatacgattacggtcgcatgcgaggtagaagatgcagacgggctgcccgaaggcgtgacggcgatgacgatcccgggaggcagatatgcccgattcgttgtctatggagacatgcaggcagctgtggcaagattctggcaggaactttgggagatggatcttgaccgggcctttacctatgattttgaagaataccaggatgacagtatggaggagacttgtatccatatgtatattgcgctgaattagaggaggtagcgtataatggcttccagcaaagagtttgttcattatgtagaagagcagttaacagatgcaggagagattacgtgccggaagatgttcggagaatatggaatctactgcaatggcaagattataggagtgatctgtgacgatcaattgttcctcaagattacggaagcaggaaggcgcatctgtccggatggagaggaagcgcccccatatgaaggtgcaaagccgtatctgctgatagatgatattgatgaccgtggttttatgacgaggttggcgcaggcagtctatgaagaattaccggagccgaagccgaaaaaggcaaagagaaaagggggacaagaaaatggaaaaaatggattataagaaggcatataaggatctgtatatgcccaagaagaagccttccgctattcaggtgccaaagatgacgtttatcatggtggatggcagagggaatccgaatacatcaaatgattatgaggacgccctggaaattctctatggcctgtcttttaccattaagatgagtaagatgagcggccgacagccggaaggatatttcgagtatgtggttccgccgctggaaggcctgtggtgggcggatgactgtgcctttgacggcaggaatattacggataaagacaagttctgctggacttctatgatccggcagccggagtttgtaacgtcagaagtatttgagtgggccaaggcggaacttaagaagaaaaaaccagagattgattttacaaagaccaggcttgagacttgggaagaagggctgtgctgccagattatgcatataggtccatatgataatgagccggcaacgatagaggttttggaagagtatatccaggcatccgggtatattacggatatttcagatcagagatggcatcatgagatctatctgggagaccccaggaggacaaagccggagaatctcaagacggtgatacgacaccccatcagacaggaggcatagaatttatcaggattacgaaggaaagtctggaaaaggagcacatctgctgtgcgatttccggtaataaagactgccaggtggcttcaaaaaagcagtggctgtcaaaacgattccaggaaggacatgcccatttgccttcacatcctactgcctgttttatgacggaaagtttctgaccaatgagattctatcggaaaagaagtttgaaaagattgcaaaacgtcgggcatgagggccgtgtggtctctgcgccggcgctgttttatgtatgggctttagcctgttcagggcattggaggttttcgtgttggtatgaatcgacaatgaaacagcttgcaatgtatcgggatatagaaatatctgaaagacagatagaagcagggcaggtaaaagatgcaagaatggcacttaaagaaatgaggacgaaatatgggttataaattgaatgttacagagcatgcagaagagttgcttgatcatcttgtgtatcatttgatttatcgtttgaagaataaagaagttgcaagacatttattagatagtatatattgtaaatgtagttggcatttttcatcagttggagaactatcagagcaaattatagtaaacgattggaaaagatgaagaattggatcaatcggcatcgagcttggtgtagaaggagtactcgcaggaggcgccctgatagacaccaaagagaaatcgcatatgggttaattaaggacaaactacagtttgtatgccttgtgatgggcgtatcaataaaggaggaggtgtttctatgacagaattagaaaaatgtatgtcgggggaagtttataattgtcatgacgaagtctttctgcaatataagaagcaggcgaaagagatgcttgacatttataacagattaacttatgaccaaaaagaagagaagaaagaaattctacataaactatttggcaggatcggaacaaatgtgtcagtaggggccccatttttgtgcgattatggatgtaatatttttactggcagcaatgtgtcaatcaatatgaactgctcatttatagattgtaatcagataaaaatcggcaataatgttatgattgcttcaaacgtgcagatatatacggcaacgcatccggtagaactggtggaacgtttaacatcagattggacgccggagagtggaaagcacttctgccaggtgtatgcgctgcctgttgagattggagatggatgctggatcggcggaggcgtcatcattctccccgggattaagatcggggcaggcagtgtgattggagccggcagcgttgtgactcatgatgtaccgcccaattatgtggcagccggaaacccgtgcagagtgatacgcagaattaacgaggaatcagagcatgattaaattagtggtatttgacttggatggaaagtatgaaggcatcatccccaaaagttagcttgaccggatttcttcaggtaaatgggctttacttagatgatcatcggacaggttcagcatatttctgttgagaaagaatatgcacagggttatgaacaacgatatggcaaagatggatttaggaaggcctataagaatttatatggaggaatcaacgaatatgaaaatatatattgcgtttctgcgcggcattaatataagtggtaaaaataaggttccaatggctgaattaaagaaagcctttgaagaacttgggggtggagcagttaagacatatctgaacagtggaaatgtgattttttcaagtggtgaagataatatagggagtcttacaagccggatcgaggtaatgataaaagatcggtttggtctggatataccggttttcgtcatatcaaaagaagatcttgaagatattttgcagcatgcacctgactggtggggtgacgaaaataaggaaatctatgataatttaatttttattatgcctcctgctacatttgtcgaattatggggtgagatcggagaacccaaggagggcttggaaaagattaaggattataaggaaacggtattctggtctttcagccggaaggattatcaaaaaacaaactggtggccaaagacagcaagcacgaacattagcagaaaactgacaatcagaacggcaaacaccatcagaaagatagttggaatgtaattgctttacagattccggggttagcaggagtttatgggattctctgctttgggatggggctcacattgcgggatgggaaaagggaatatttctataaacagttggaccttctgtttccaggtatgaaagaacgatatatacaacaatgaatagtttggcagaggaaaattttacagtctacagatggtaacgcagaaatgatttccgttggttcgggaagttcctcaaaattaagaaaaagcagcgtaacatacgtttgtacattacgctgcttattatataacgaaagaattttcccgctggcctggcactgttataaaactaaagagggcgcggaatatacccttgcagccagttcggaatccagcatatagaggcttctggagtcatggccgaagaggttgaacttggtaatcagatcatccgcattcttctcttcctcaccctgttcctttacaaaccagtctaggaactgcatggtccggaaatccttctgcgcataggcagcgtcatagatggcgtgaatcaggctggtgacaaactgctcatgctcaaggcccgcttttagaggatcttcaaatccggccagaacagcatcaggcttatcgatagattccagtgttactttctccccgttattctgtagatattgaatgaaaagcatggcatggtcgcgttcttcctgtgcctggatattataccagttcgcgaatccatccagcccttggtctttatagtaattggcgaaatccagatataggtaggcggaatagaattccttattaacctgcgtgtttaataattcagctacttttggatctaacatattgatttcctcctttaagtttaaggtctgcagaatttctgcaaatttattataacattttaacgggatggtggcaatgggaagtgtcggaaggaagtgtcggaaggagtagaagtggattttctgattcttatatgatacgatatatccagaaaaaagaagggggaagaattattgagaccatcgcagataacggactggtgccatgagatcatccgttcccaggctgctgccgggggattctatattgatgccacgatgggaaatggaaaggatacgctgatgctttgcacgctggccggaaaggccggaagcgtactggcttttgacatccaggatacggcgcttcaagccacacagaggctcctgaaagaacagggatgccttgagcgtgccagtcttataaaggacggacacgaacatatggacttgtatgcaggggaaggcaccgcagatgtcatctgctttaacttcgggtatcttccaggcgggagccatcacatagccaccagagccacaaccagcgtggaggcaatccaaaaaggattaaagattctgaaaaaaggcggcatgatgagcctgtgcatctacagcggaggagacacggggtttgaagaaaaggagaggatactggactatctcagggaacttccggcgcgggagtatacggtaatcgtaaatgcgtactataaccgggcaaacaaccctccaatccctgcgtttatctttaagaattgacgctaaaagcagggagttttacgggaaagggtttgacatttcaggaagattgaagtatgcttaaaaggtccaaagaatcatagatcatatatccaggaaaggaaggcgagattatggacggtaattcggcgcgaagttgtagctttacaatgacaatcggatacgggaacaccataagtatgccttcttttaggatttactgtagggagaggaggactctccttcgataaatgccttttcatctgaaggtttgattttgcgtgctgccatatccggttggagatggcagtatttttatgcccgaatgcgcgaaaataacatttcagacaggaggcagagacaatggcaaagagtattttattagaattattagaggcgagaaactacaaagaattaaagagactgatgggagagtataacccggtggatctggcagaacttttgatggaattaaacgaccgggatctggcaatcgtattccggatgattgagaaggataaggcagcagaagtattttcctatatggacgatgaccagaggcagacacttcttgactgctttaccaaccaggagatcaagcatatcctggactccatgtatacggacgacgcggtagatctgctggaagatatgccggccaatgtagtcaataagctgctggatcaggtgagcaaggatacgcgtgcggatatcaaccggcttttaaattacccggaggatagtgcgggaagcattatgacggtagagtatgtggatctgtccccggacatgacggtaaggcaggccctgcaaaagatccgtaccatcggaatccacagtgagacggtgtatacctgctatgtgatcgtccagaggaagctggttggcattattacggcacaggcgctgatgaccaatgatgaggatgtacaggtgaaagatttgatggaagagaattttatctttatccggaccaccgacgacagggaagatgcagccaaactcttccgcagatatggactgatcgcaataccggtactggataaggaaggatttatcgtaggaatcgtaacctttgatgatgctatcggggttctgacggaagagactaccgaggatatccacaaaatggctgcgatctcttccagcgaagagtcttatcttaagacatccgtattccagcatgcgaagaaccgtattccgtggctgctgatcctgatgttctcggcgacgatcacaggagcgatcatcacgaagtatgagaatgcattccaggtggtcccaatcctggtgtcctttattcccatgctgatggatacaggcggaaattgcggctcgcagagttcaacgctggtgatccgggggctggcggtggatgaactgcatttttcagatttcttctccatcgtgtggaaggaattccgcgtatccctgatcgtaggaattgtgctggcagcggtcaacggcgtaaggatatacttggtatatggcggcgatgtgcagttggcgatggtggttgcggcttcgctgataggaacgatcgtggtggccaagatggtaggctgcatgctgccaatttttgcaaagcagctgcatcttgacccggcaatcatggcatcgcctttgattacgacgatcgtagatacctgctctatcatgatatatttccgtatagcgacccttgtattcggactttaggattgcgtccgtccatatctttgctacatggcagcaggattcctcctgaagggagaattaaattccccgtgcaagccggtagatatctgctatgtgctcccggttgagtttccgtacttttccgattgtacgggtattgccaaaactgcatttgtcggcgagttccagaatctgctcttcgctgggggcgattccaagtttgtggaggctggtaggcattccgatgctgcggaaataatcttccatagcctgaatgcccagaagagccatctgttccaagtcttcactgtgaggaatcagaagaacattctcggcaaacttggcaaaccggtccaggcgatccttgcacacatagcgggcccaagtgccccatatggccgcaaggcccgcgccatgggctacgtcgaacatgccgcccagttcatgttccaattggtgggaagcccagtctccgccatcggtaccgcatccggtgaggccattatgagagaggctggaagcccacatgacttctgcacgggcgtcataattttggggatcctttttcagaatcagagaattcttcatgacggtacgaagcagcgtctcgctgattccgtccgtcatctccatattcgtgctttggttgaagtagcgttccatcgtatgcatcagaatatccacgcatccgctctgcgtctggtaatccggaagcgtatatgtaagttccggattcaggatggcaaacctgcagcggcaatattcacttttatagccacgcttctttaagccgtcttcattcgtaatgacagaagagttgctcatctcgcttccggcagccgcgatggtaaggatggcgccaattggcaggcaggcggaagcggtacgcttcctcgcataaaagtcccagacatctccctcatttgccacgccatagccgattgccttggaggaatcgataacgcttccgccgcctactgccaggataaagtcgactccttcccgctggcacagtgcgattccctcgcgtactttggtaagacgggggtttggaaccacgcctcccaaggaagcataggggatgccttcggcatcgagggaggcatatacgcgatccagaaggccgcttcttatgacgctgccgcttccgtaatgaaccaggaccttcctgcatccctgctctttgataaggcttccggctttggactcggtatctttgccaaagacgactttggtaggcgtatgatattcaaagtttaacatattagacactccttcttgctcattttttcatgaccattctatcatatttagccataatagggtatggtacaataaaatatcgaatcattaacggagattattcaatctggctcgatatactggtacatcaaagacaaggacgtcgtatcgttgatacggcgtccttttttgatcttaacaggcgtttatctgtctaacttgagttccagggcatagacgataccggataatgtatccataccggaagaatgtccgatttcagaaaaagattttaaaatatcttcgaacggaggcagcaaggtcagcgagattacggcgcggctgaaatgggatactaaggcacagttaaggaatgccctgctgatctcgtttgtattggcaagccgtgagcgtatctggcagccaagttccagcgcgaaaggatgcgagccctgatttctaaggaggaggccagccaatacgccgcacaggaaatcatcgccgctgggagtaaggccgatcccaagtccgagaagtccggctaaggtgctggcagcttcctgatactgcccctgctccagaaggagcatgcaggatgacatccgcttcctggcagtttccaggatgagatcaaaaggttctgccgaacttttataggagtcagacagcaggcaaaatcctccagtgtccgatgtggacaggacgctacgcagcctcgcgtaaagttttgcgtgggaaaagcctgggagcggggagaccagttgtgattcgcagatctcttccggccgatatagaaaggaagacgaacattcggcagacgcagagtcaggcataacgatctctatccgatcgcccaggacattcacgggctggccaggacggatgggaagctgatccatggattgcccctccatatctgtgatcaggctgataggggacagaggggacgcggttgactgtagtgccagcagatgctgtcccagccggatattgatcgtctttttataaacagaatggacagtcccggatatacggcaacttaatatctggtctgcataagtggatgtcgtggtaattacatggcacatgatataaatactcctttgtctatagattttaccaaagaatagaataaattacaaaaaataaatagaaatccatatttttttatacatatcagacaaaaatagcgtgcttttttccgttttcatgtaattgtttttcagaattgtatctaataaaatacacttaagtattattaatggttaaccagagaatgataaaaaaaagacaaaacgccttttgtaaggaggaaaacaatgtatgatttggtagtaaaaaatggtaagctcgtaactcctgaccgtatttatgaagccgatatcgcagtaaaagacggagtctattctgcatttttggcaaaagggacagaggctgcagcaaaaaaagtaattgatgcaaaaggatgctatgtgtttccgggcattattgactgccacgcacatttgaatgaaccgggatttgaataccgggaagactttgagacaggatccagggcggcagttgtggcgggctgtacttgcctgattgatatgcctttgaacaatgacccatccttaatgaataaggagatcttcgatctgaagatgggacgcatcagcaagcattcggctgttgactttgctctatggggcggcatcgtcggagattatgacagtcagccgggatcggtaaagaataatatggatgatcttgtggatctgcatcactgcggcgtagcggcattcaagggatttacctgcccgaacggcgatctgttccctactgtcaacatgggaaacgtaagaaaggcattggagatactcaagccctataatgcgctttgcggcttccactgtgaggaattcggacaggtgctggagcgggagaaagaggcaaaggcaaaagaaggaagaaccaacgatgagaagatcagagactttctggattctcatgatgtatggacggagtatgtggcaaccaagaacgtcattgacatggcaagggccacagggggaagggtccatatctgccatgtaagccatccaatggtggcccaggtagtgaaagacgccatccatgagggacttaagattactgcggagacctgcccgcactatctcggatttacagaggattttgtatttgaaaagggcgccccggccaaatgtacgccgccaatgcggacaaaagaagacatggagaaattatgggattatgtgctggatggtaccttatcctgcgttggaagcgaccattctccagcagcggatgaagaaaaggataatgccacaaaagacatctggcatgcatggggcggattgaattctatccagttcttccttccgatgatgtttgacatggtagtgaacaagaagggattaagccctacgctgatcgcaaaggttatggactataatccggccaaagtattcgggctgtatggtcaaaaaggcgcgtttgaacttggatttgacggggatatcgtaattattgaccccgagaaggaatgggaatgcaagcaggaggaactgctgaccaaaggtcatgtgtcctgcttcgacggactgcaaggaaaaggaacgccaatatgcaccattatccgtggcaaggtagttgctgctaacggggcttataaggaggatgcgattggctatggtaaatatgtgatgcctgtgaaagcagactaaccagcataggaattaaggagagagaatatgagtgatgtgaataatgaagtaaaacatgaagccgattctttagcaccaattaaggataaagaccggattatgggctggggctcttacctgatgctctggcttgggggatgtatttcaatcggaacgctgaccatgggctcagcccagctggataagggactgaatctgatgcaggtgttccttgccgtgctgattggttccacgatcttggttatcggcatctgcgccaatgaccgcttcagttataagtcaggggctccgtatgcgattcagttaaaaagcgcgtatgggacgaagggaaatatcgtgccggttatgatcaggggactgcctgccattgtatggtatggttttcagacatggcttggaggttctgcgattaaccagatatcgattgccatatttgggtatgataatgttgcattattcttcatcctgttccaggtgcttcagatcatcctttccgtaaaaggattccagggtatcaaatgggtggaaaatgtaggcggcgcggtaatcgtctgcgcgatgctgtatatgctctttgtatgcgtcacccagtatggggatgttatcggggataagctgatcagtaaagaaggaacatggggaatgccttttatcgcggcaatcatagccttctttggcaatagtacgacggtcatgctgaatgccggcgactattcccgggaattaaaacctggattctctgttgggaagcgtggtgttgcatactttatcgctatggtgcctacaactgtactactggggctgattggagctatggcttcgactgcgacaggcattgccaacccaatcaatgcgttttcccagatggtacataataaagtcctgctgatcgcaacgcttggattcatcctttttgctcagatgaccacgaaccttgcgagcaatgtggtgccgccggcatacgcatttatggacgctttcaagatgaagcacaggacggcagtaattctggtagggatcctggcagtatgcacctgcccatggatcctgacgaatgacagttctgccgctgggctggatatgtttgtaaagatctatacggccttcttcggaccgatttttgctgtattgatcaccgattactatatcctgcatagaggaaaggtggaaggcgagaaactcgacgacttatacgatgataaaggaaatcatgcgggcattaactgggcagccattatcgcgaccgtgattggcgctgtcatcggcctgatcaatgtagatatttccttcttcacagcaacaatcccgacagggctggtatactatttctgtatgaaaaagatgccgtcctgcgaaagattcaggaaagggacttctttagagaagtaacaggaggcatgacttatgtatgatgttttagtaaaagatgggaaaatcgtaacggcagatgctgtatttgatggaaatatagcagtaaaaaatggaaagatcgccgcccttatgtcagcaggcgaagaaccggaagcaacgaaggtcatcgatgcaaaggggaactatgtgttccctggagcaatcgatacgcatgcgcatctgaatgatccggggtatgagtggagagaagattacgaacatggaacagcggctgcagttctgggcggatatacgaccgtgatcgacatgccgcttcagaatgagccggccatgaccactgcagacttatttgacaaaaaagttgaaaaggtggatggcaatgcgtatgcggactactgcttctggggcggattggttccagataattttgaggacttaaaggggatgcatgacaaagggtgcgtggcgttcaaatcatttatcggaccagtatctccggactatagttctcttaattacgggcaggcatatgaagcaatgcagcgcatcaaagaattcggcggacgtgcagggttccactgcgaggacttctccatgatcaagtggcaggaagcccgcatgaaaaaagaaggccgcctggactggcagggatttctggattccaggccggtgatcgcagagatggttgctaccgtggatatgatcgagatcgccaaggcgaccggatgcaagatccatatctgccatgtcagcagcccggatgtggctcagatgattaaagaggcacagcaggaaggttatgacattacagcggagacttgctcccattatttaagcctgacggataaagacgtgattgcaaatggcccgatgttcaagtgcgcgcctccgctccggtccaaggaggaagtggatcgcctctggtcttatgtagaagacgggacattcagcggaattgcaagcgaccactctccttgctcttatgatgagaagttcaatgagattcttggaagcaagattgagaatgtgttcgatgtatggggaggaatcagcggaatccagagcggcttccaagttgccttcaacgaaggctgcacgaagcgcggcgtgaatccaagcgtactcgcgaaagcaatggcagtacagccggcgaaagcatttggcatctatgggaggaaaggtgatattaagcctggatttgacgcagatttcgtgattgtagatccaaacaaagagtgggagatcaccagcgaatcgcttctgtatgtgaacaagatttccgcattcgtgggaatgaaagggaaaggacttcctgtgtgcaccatcatccgcggaaatgtagtagcagaagacggcaagattacggcagaaaaaggcgtaggaaccctgatcagaagattgggctagcctaccggcagatcgaaaggagagagaatgagcaatattatagaaaatatggatttgaatccggaactggttcagaatgtagacccggaccttcagcccacaaaaaagaggatcatgggatcattatcctatacggcgagttttatgggagggtgcgtatcaattggtacattctctatgggcgcgggcctgatcggagtattgacggtaggccaggcggttcttgccatggtgatcggatgtcttgtgatcgccatagcgctggttatcatcggaaactgcggacacaagtatggcattccttataccgtgcagttaaggagcagttttggcacggcaggcgttaaggttcctggactcttaagaggcgtgccggcgattatctggttcggattccagagttgggttggtgcgggagccatcaacagctgctttaagattttattcggatttgataaccttccggttatctacgcattatttaccatcctgcaagttgccctcgcaatcaaaggatttgagggtattaagtggctggagaacatctcctgtatcttcatcatcgcgattctggcctatatgctgtatgtagtcaagacacaatttgcggcagagatcgatgatgtgttctcaggaatcaagggaacatggggaatgcctttctgggcagcgactacatccttcctggggatttattcaaccatgatcatcaatgcatccgattattcccgtaacgttaaggaaaaaatcgggcctgtctttacaggcagcatttacaccgttgcgattctgcctgtgacattattcatggggctgatcgggcttctggttacggcagcgacaggaaacagcgatccggtagtcgtattctccacaaccatgggaagcaagttccttacagtcgtaacgctactgttcatcgcatttgcgcaggtaacaacgaacgtgctgaacaatatcgttcccccgtcctatgtacttatggaatccttccgcatgaaatggtcccatgcgacaattgtggtaggcatcctctccgcatgctgcatgccctggaaactggttacagaccagtccgcagccggactgaacttattcacgcagttctattccgcttttcttgggccaatcttcgcggttatggcggtagattactatatcctgcgtaagaagaaactggatatcaacaacatgtataataaacagggcgtattcaagggcgtcaactgggctgcgatcatcgcgatcatcgtcggctccctgtgctcgctgatcattgtgcagctgtcatggtatgtaagcctgattccgacaggactggtgtactacttcctgatgaagacgatgaagagttccgcgccattcaggaccgggacagtgtttgaaaaataaaaagtaacacgtaacatttttcacatggacacgtaacactttgcaaaagtgttacgtgtccatcttgcattactggtgtgcaaaattaaaaaatgtctgtgcaaaaatagacgaagtggtgtgtgaaattgaaaatgcaataaaaagcagagagtatcatagcggcaacagtggaagatacacaccagttatgttgattttgcacaccaattgtgtagggttagcacgtaacacttttgcaaagtgttacgtgctaatgtgaaaaatgttacgtgtcaagaagaaacgccagggattcttccagcagccgttgtgtaaagggatttttttcatcccggtcgaaatcatgggtgctgccggcggcgataaactgccgggggttgaagcggctgcacagttcgagatattccgcataaggcacatccgggtcgttggtgctatgggcgcaaaacagcggacacggaagcgagatgcaggtgcgcagggtgtagtccaaatagaaatatttctcccgtccttcgtagatcagggagcgccagcagccagtctgccttgcatagacgtagatactgtagtgggtctcaagcccgcccgaggcgcggatgtctgtgccggcattgcttaggcaggatgcgtccaccggcggcagcgagcagtaataatcgctgggcgtctggaaccagttgtcgcacaggaatccatacccataataggagaggatccctttcggggcagtgggaagatcgccctgtgcagcggccagcaggcagaggtaagcgccggcggagcgcccccataggtagaagggaagctcgccttcgcagtacagacccggatgctctacataatgcgcgatggaagagcagacatcgtccaggatcatatccagttttgccgcaggcgcaaggggatagtcataggaaacaataacgtatccggccttagtcatcctctcgatgtggaggggcgggagatcatcccgctgtccgtataagagcccgcctccgtggaaataaaggatgcaggccttcagggtaacgtcggtatcagaatagacagttgcggatttaaggtaaggggtactgcaaatcagcagttcttttttctcttgcatggtgatagtctcctcctacaaatagtataaaatatagaaaaaatgaataagttatttccttaagatgcatgtccgtgccgttcactgcaaatgaaagagaaaaatttctataggcgttggcgttacggaaattgccgtataaacagtataacacatatccagggaaaacagatatgtgaaaagtttgacaatggggtataatgtagataaaaaatctccttcgatttttctaaaaatataattgaaaaatagaggttacattgccataattgaggtataaaaactggttgaccacaaaatagattgaaagagaggaattggaaatgagttatttgaataatcaggtaggataccgcgaggagttactgacaacacgttccgtaatcaaaaaggagaattacgtgcttcttgagccagacgggctggtaaagaacagcattccaggatacgagaactgtgacgtgacaatccttggctctcctgcaatgggagcatcttttgcggattatctcgtaacagtaaaagaaggcggaaagaacagcgggatcggcggagaaggccttgagacattcctgtatgtgctgtctggagaggtgactgttaagaacgatgacaaagaagaagtgctgacagaaggcggatacatctactcgcctgagagcaacaaggtttcttttgagaataagagcggcaaagaagcaaaattgtacgtatacaagcgcagatatgaaagaatcgaaggatatagcgcatatacggttgttggaaatgcaaatgatatcccatgggtagagtatgaaggaatggaaaactgccacattaaagacttccttccggcagcgggagattttggctttgatatgaacatgcatatcctgaaattcaaactgggcgcatcccacggatatattgagacgcacgttcaggagcacggaatgtacttcctgtcaggaaagggaatgtatcgcgttgatgacgagtgggttccggtaaaagaaggagactacatgttcctggatgcatattgcccgcaggcatgctatgcagtaggacgcgaagaggatttcgcatacatttattcaaaagactgcaacagagacgtgcagttataaaagagaaatatagataagagaggtgctgaaatgaaactttcccatgatgaattaaagggattaatgaagaataaattgatgagagccggactgaaagaagatcatgccgatatgactgctgagattcttacatggtcagacgaaagaggataccattcccatggggcagtgcgtgtggaatattacagcgagagaatcgcaaaagggggaatcacggttgaccctaagtttgaatggaaagagacaggcccttgttcagcaatcttcgaaggagataatggctgcggctatgtagcgtctaccctggcaatggaaaaggctgtagacatggcaaagaatacagggattgccgtagtaggcatccgcaacatttcccacagcggatcaatcggctactatacggagatggctgcaaagaaggatctggtggcaatcgcgttctgccagtctgatccgatggccgtgccttttggagggactgagccatattatggcaccaatcccatctcgtttgcggctccgaccgcggatgacaggaccgttgtattcgatatggctacaaccgtccaggcctggggcaagattttggacaaacgttccagaaacgaggatattccggatacttgggcagtggatgaaaaaggtcagccggtaacggatccaagccttgtaaacgcgctggttccaattgcaggcgcaaaaggatacgggctgatgatgctggtggacatctttgcgggaatccttctaggcgttccttttggcaagcatgtaagttctatgtatcatgacctgtctaagggaagagatttgggacagatgtatattgttatggatccgtccagatttgcaggacttgatgaattcaagaaatccatgtcccagtccctggatgaactgggagatatgccggcagcagaaggatttggcaaggtatactatccaggagagcgcgcagtgatgaggtgtgacaaggcatatgctacaggcgggattgagatagttgacgagatatacaattatctggcaagtgacgatatacactatgacagatatgacaataaaaacagatttgccgaataggggaaggagaacatatgttaaagacaattgtgaaaaagggcagttatcatgattccgttgttctcatgcttttgacgaatcagatctctacgattgaaggtgtgaaaaaggtttcaataatgatggctactccggccaataaagacatatacagacaaagcggattaagcacagaagaactggaaagcgcgtctgccaacgatatggttgtggtggcggatgtggatgatgacgccattctggacgtgatcatggaggaagtggaggaattcttcaagaagcagtccacttcagaaggagacaaaaagggtgccgagtccgtaaaatcctgggataaagcccttgggaaacttccggatgccaatcttgcggttatctcgattcccggcgcatatgcggcgcttgaggctgaccgcgctctggatgaaggaatgaacgtatttatgttcagcgacaatgtgacgctggaggacgaaatcaagttaaagcagaaggcgcatgaaaagggactggcagttatgggccctgactgtggaaccggaatcatccagggtgtgccgatcgcatttacgaataatgtaacgccaggagccattggaatcatcggcgcgtcaggcaccggaatccaggaacttaccacgatcattgaccgcttgggagaaggcgtgaagaatgctatcggtaccggagggcgcgatctgtctacagaagtgggcggaatcacgatgatggatatgatcgaggctatggaaagcgatgacagcgtgaaagtgctgattatcatatccaagcctccggcaaaagaagtaagagacaggatctccgatcgcttaagcaactttaaaaaaccggtagttaccctgttcttaggcgaaaagccagaataccacgaggagaacttctaccatgcatatacgctggatgaggctgcgcgcctcgcagtaggtctggtaagaggagaagagatcaaagagggaaaggtagatgtagacgattcccagttctttggcgcagaggagaagaagaccatcaaggcatactattccggaggaacactggccggagaggcagcaatgctgatcaaggatgccctgaacctgaaagtacctccgcagaaggcagaaggcttcatgcttaagacggacggccatatcgtagtagatctgggcgatgacgtatatacgcagggcaaaccccatccgatgatcgatcctgcaaaacgtatcgaatgcatgcaggacgctattgatgacgcatctacaggcgttatccttctggatatcatgctggggtatggctcccatgaagatatggcgggcgctctgcttccatctatcgttgaacttcgagataaggctaaggcagaaggaagaaaattattcttcgtggctactgtctgcggaactagaagggacttccaaagttacgacgaagcagtaagcaaactgaaagaagctggcgttatcgtatgcgagaacaataaactggcggtacacacggcaatccgcgcgatcggactggacttcgaagagcctgcaaaggagattcgtaaaaagacggtggcaaagatcgagaagacagaagtgtcagagaaactgatccagcttctttcccagaagccaaaggtaatcaacatcggcctgaagagttttgcggaagtagtagaatcctttggatgtgatgtcgtacagtatgactggatgccgccagccggaggaaatgtggaattgatcaaggtgctgaacttcctgagaaattatgaagaattcgctattgatgaggcaaaccgctctgtaatcgcaaaagtggtagccagccagccggtcatcaaagatgtagtacctgcgaaatcagtcatcaaggaactgaacgaaggtaaagtgatcctgcatgcaggcccaccaatccagtatgagaacatgccggatccggtacagggctcctgcgtaggcgcggccctgtttgaaggatgggcgcagacggaggaagaagcaagaaagatcctgggctcgggagaagtgacgtttattccatgccatcatgtaaatgcagtaggaccaatgggtggaatcacctccgcgaacatgcctgtattcgtagtagagaaccttacggacggaaatgaagcctactgcactatgaatgagggaatcggcaaggtgttgagattcggcgcttattcgcaggaagtcgtagacaggctgttgtggatgaagaacatacttgggccgacgcttggaaaagcaatccgcaccctcgggggcttgaatgtaaacccgcttgtggcaaaggctatcgctatgggcgatgaattccatcagagaaatatcgcggcatcccttgcgttcttaaaagaaataagtccggtaatcaccaagatggagatggatgagaaagaccgatatgatgtaatcaagttcctggcagacacagaccagttcttcctgaacattatgatggctacaggcaaggcagtcatggacggcgcaaggaagattacagacggtaccgtggtaacggccatgtgccggaacggcgtggacttcggcatccgtatcagcggcatgggagatgaatggttcactgctccggtaaatacgccgcagggactttacttcaccggatatgacggggaagacgcatgcccggatatgggagacagcgctattactgagacgctgggcgtaggcggaatggcaatgatcgcagcgccggctgttaccagattcgtaggcgcaggcggatatgaggatgcccttcgcactagcacggagatgacggagattaccattgaccgtaacccgaacttcattattccgaactggaacttccagggcacatgtcttggaatcgatgcaaggctggtagtagaaaaaggaatcacgccagtcatcaacacaggaatcgcgcataagattgccggctatggccagattggtgcaggtacggtacatccgccgatagaatgctttgaaaaggcaattctggcgtatgcaaagaaacttggattctctttgtagaaagcttaggaggaaacgcctatgaaaaagaaacgggttgtgattgctctgggaggaaacgcgctgggaaaagacattgaagagcagaaagaagcagtggcaaagactgcaaaagtaattgtggatctggtgcagcagggaatggatcttatcattacccacggcaatggcccacaggtcggaatgatccagaacgcaatggatcagctggcttgcagctatgagaactacaaagaaacgcccttgcccacctgtgtggcaatgagtcagggctatattgggatagaccttcagaatgccattaagtatgaattgtataatagaaacatggacgtaaaggtatccacaatcctgtcgcaggtagaggtggataaggaggatgaagcttttaagaatccgacgaagccaattggaagattcctgacggaggaagaggcaaggaagaaccaggaaaatgggattccttgtatggaagacgcagggagaggctaccgtatcgtagtcgcctccccgatgccgaagaagatccgcgaactcaagacgataaagacgctggttgatgcggggcatatcgtgattacctgcggcggcggagggattccggtagtaaatgataatggaaaactctccggagtcaatgcagtgattgataaggataatgccagcagccttttggcagcggaactgggcgcggactatctgatcatcctgacagcagtggagaaagtggcgattaatttcggcaaggagaaccaggaatggcttgcagaccttacggttgaacaggcgagggaatatatcgcccaggaacagtttgcgaaaggatctatgcttccgaagatcgaggctgctatccgtttcgctgagtcgggagaagaccgtcgtaccttgattaccttgcttgacaaggctgcaaaaggaattgccggcaagacgggaacggtaatacataagtaattaggagataaattatgaacgtaccaacaaatctgtttatgtggataatggcatgtctgccaattattgttttgctagtattaatgatcaagttccagtggggggctacagacgcagcccccgtagggctggtcatcacaattataaccggaattgtattttataaagcagatattcggctgctggcagcggagagcgcaaaaggaatctggagcgcgctgatcatactactgatcgtgtggactgcaattcttctgtaccaggtagccgatgaggccaaggcgtttctcgtaatccgtaatggaatgcgtaaacttctgcccaacgaattgctggtcgttctggctttgggatggattctggaaagcttccttcagggaatcacaggattcggcgtgcctgttgccgtaggagccccgctccttattggaatcggcgtgacgcccttatatgcagtcatcatcccgcttctgggccaagcctggggtaacacctttggtacattggcggcagcctgggacgcactggctatgtccgtcaaccttgccccggggacgccggattatctggcaagcgctttttgggcagggctgttcatctggatgtggaatgtcgtgaccgggctggttctgtgctggttctatggaaaaggcaaaggagttaagaaaggccttccggctgtactgatcttgtcggtaatccaaggcggaggagaactgcttctgactcaggtgaatacgacgatatcctgcttcctgccatcctgtatctctctggttgccctgttcctaatcggaagaatgaagatgtacagggaagagtggagcctgaaggacagccagatcatgaaccgtacgttttcaggagactctgtcaacgaggcacctgcggatatgtcccttctgcaggcgtttgtaccatatattctgttaaccgtcatcactatggcggtgctggtagtaacaccggtgaacaaattcctggggcaggtatcccttgggttctctttccccgagacctctacgggatatggatttgtcaaccaggcggaaacttgcttttcgccgcttcagcccttcacccatgctagcatgtttctgttcctttcttctcttgcaggacttgtgtactttggaaagcatgggtggatcgggcctggcggaacgaaaagagtattcgccaaatccattgccatgacgatgccatcgggaatagcggttatcggcctggtaattatgtccaagatcatgggaggcaccggccagaccagcgttcttgctgacggaatcgcgagaatccttggaaaggcatatgtcatattggcgccggtagtcggaatgatagggtcattcatgacgggaagcaatatgtcttccaatatcctgtttggcgaattccaggtgaccacagccagcctgcttcaccttgacaaggcggcaatacttggggcgcagacggccggaggagcaatcggcagtgctatcagccccagcaagatcattctcgggactacgacagcgggtatccttggaagcgaaggacaggtgctgaaaaagattataccaattacattgacgactacactggtaatcggaatcatcgtatttctgtcagtcatgtttgcgtaggcaggatgcgggagagtgaatggccaggatgtagttaagatataggagattgggcagtatggagaaaaaaagtttttataagacaaaagagggcgggcttacattggcatttgcagtcataatgatagcattttttgtaatcctgggagggcttaaaatgtcaggagacgcggtatgtgcaactggatttatcatgatggtcgcggccatgctctactcgccgctgaaagtatttgtgatagaccgttagaaaaaaggttagtagtatcgcttcttagaaaagaagagaaagggtatgtatatggtgattgaggaaattacaggcagaattgcgagagacttggaacatttgaagcaatttacggcgacaccggggaatgggtgtaccagactgccatttacaaaagaggccagacaggctgtggattacttgaaggaactgatgaaggatagcgggctggaagtatcggaagatgctgcgggcaacgtgatcggagtattaaaaggcgaagatccggatgcgccatgcgtaatgatgggctctcactatgattccgtatataacggcggagactatgatggaattgccggagtcatatgtgcaatcgaggtggcccgcctgttaaaggaagaaggaatcacgccaaagaggaattttgttgcagtggggttctgcgatgaagaaggcacacgttttggaaccggatatttcggctcaggagccatgttaggacaccgcgatgtagagtatacgaagaaattcagtgataaagacggagtatccatatatgacgcaatgaaagaatatggattggacccggagaaggtaggagaagccgcctgggaggaaggcaagatcggttccttcctggaagcgcacattgagcaggggccggtactggatgcggaaaatacagagattggtctggtagactgcatcgtaggcatccagcgttatatggtgacggtaaacggccgcgccgaccatgcgggaacgacgcctatggatatgcgtaaggacgcggtggatgcagccacaaaagtgatttcaaagattgcagactgggcaagagaaaaagccgatggaaccgtcgctacggtgggctacataaatacagtgcccggtggaatgaatattgtagcggaaaaggttgaatttacggtagatatccgttccagaaataatgacaacatcaatgatatcgcagccaggatcaagaaggctctggaaagggaagtcaaggaatttaacggcagtttcgagatcgtgaacaagctgacgattacgccggtcgaactttcagaagaaatgctggatattatggagaatggatgtaaagagcgcggatacacttacaagcggatgttaagcggcgcgggccacgacgcgctggagattggtcaggtattgccgacagtcatgctgttcgtgccgagtaaggaaggcagaagccactgtccggtcgagtttacaaaatacagtgattttgccaaggcagcggttatcatgcagagtctggcaaaagaacttctattgaaataagattttatgggcagccagatgttgaatccgatgaacaaaaaagaaaatcttcgattactgagaaggcgcctgggattgacgcagaaagacttcatcggcagattcctgtcagatgaagaaggagttccttccatgagcgtcgctacattgtccaatctggaatccaggggagggccgcgcttaaatgacgtgattcttatggcggcagatgccttacagatagactctatgctattttccatgaagccggaagagttcatccaaagaatagacattctccttcccggaggccaagatgtagatgatatccgaagcaacgctgtaaagaaggggaagatcgaccagttattataccggcttaccatgtattttgctgagaggcttattgacaaggagttaaaaaaaggagataagatcgaatctgacagagtgttggcaaagaagatgaatgtagggcgttctgcgatcagggaagcgctgaaggttctcgatgtattggggatgattgatatccatcccgggcagggaacgtttatcagtaatgatgaggccagttttttcattatccccttgtcatggtccctgtttttaaacggagggcaggtggaggaaatcctgacagtccggaatcttttggaagtcaaggcagcggaactgtccgcaggatgccgggatgcaggcggcctggagcggcttggagacatttcccggcagatgaagcagtcatacgagaaaaagaatcagaaagaattcctggaatatgacattcagtttcatggctgcattgcagagtgctccggtaatcaggtgatattcagcatgattcagacaatcaacagccttatgaggcatatcactgatacggggatggccgattcgctgcagcttaaagaattataccaggagcaccagaagatatacggcaggattcttgaacgcgacagcagtggggcggcagaagccatgaaagaacatctggaacggtcggctgcaagatataataataggtagtaaaggacacaggcgttagaattttcattaggcgtctgtgcctttttatgctatactataaacaatactagttgtgtcaaatataattatggcggtgaggagaaagatgggatttagtgtaagagaactgcttttagaagatgagttgaatgaagtgaaactgctgggaggtgaaaagggacttgataaagagataaaaggcgtgacgatcatagaggcgcctgatatcgtcaagtttattgacggaggagaagtgcttcttacgggactctatgctttcagatcatgctctattgaggaattccaaaggtacatcaatgaattgacgaggaaaagtgtcagcgcgctcatattaaagaaaggaagaaaggtagaaaatgcggacgtcaagatcgacctccttctggaattcgcgcagactcacggaatcccgattctggaggtgccatttgagttttccttccgggatattatgagcctgatcatggaacggcttttcaatgaggaagtaacccggcttaaatatttcaagactactcacgataacttcgcggctctcgctcttgcaccggatgctaccgggaaaggggtggataagattctggacgtgcttgccaaactgatccgcaatccggtagccgtcttcaaccagaacatgacctgtgtcgcggccacggatggtgccgagagagaacttgtgatcagcaaggaggctgtcccattcgagccggagatattctccaactacagttatctgaagcagaaggtagaagtatcccaatgtatcattcaggtaaagatgagtttccgggagaagatttatctggtggttacagaacttggccagccatttaatacgatggactgcatagcaacagagagtgcaattacggccctgcgttttgaattttccaggcagtatgcggtgacagaactggagaagaagttccagaatgacatcatgcacaatatattgaatggaaaagtacattctatgggagaacttcagaagaataccagcctgctgggcgtagatattaatggaagctatcgggtgatcgtattcggcatggccaatgaaagcatgacaaagggtgactttgaggcaaaggtgaaggacaccaatgtcttaagcgaggcaatcttccgctatatttccaacgcaaagatacataatgaccttgacaagatcgttgtaatacagggagtggacaaggaacagacgcaggaagaataccgcaaggaaattaagaaagtggccgaaagcgtgcaaggcgatgtgtcaaagcataacaagcatctgaaagtgaaggcaggagtaggcaaggtggtgaatggaatcatccatctgcctgaaagttttaaggaagccaatgaagccttcatgttcgtggatgtggcgggagagatatcagaagatggcaatccgcaggctatgctattttcagatcttggcatattcaaacttctctgccagctggatgagccttccatgcttctggaatacgtgcccgaaggcctgcagaaactgtataactacaagaagccccagagggaagatctgatcgtgacgctcaagacgtatttggacagaaaccagaacctatcaaagacagcgcaggatctctatgtgcattataagacggcggcataccggattgagaagattgccaagattacaggcattgactttgacaatgccaatgaagttctggcggtcaggatcggcctggtagtgtataagatgatagttaattataacaaggatttcatctagaatttgcctgtaaatgtaagaagaaagataatttatccagactggataaacgatctttctttttttatctttttgatccgatgcaatatgttaaaaaattatctataatgtgcaatatagataagaagtttgaattcatgaaaaagcaagtgtacaaatttgccaaagaaataaggcaaaatggagggattttatggaaatcaagttggaaagaatcctctcccgtctggaggaattgtaccaatgcggagcagcagaggatggaacctataccaggatggcctactctccggaagatgtaaaaggccgggagacattcatgggatattttcagaaactggggcttgagccaaggatggatgcggcaggaaacctgattgtcagactggaaggggaagatcccagccttccggtgatcatgactggctcccatctggacacggtgccggacggtggaaagtacgatggagtcgtaggatgcgtggcgggtcttgaggtatgcgagacgcttcttgagaatggaagaaggcttaagcatccgctggaggtggtcgtgttcaccgacgaagaaggattccggttcggaagcggcctgctgggaagcagcgcgatctgcggggaacagttgcatgtcagcgggacagacctggatctgtacggacaggcccgaagcgaggtgatgaaagcgtatggaatagacgtatcaggtatttctaaggcagaaaggcaaaaggattccgtacactgctttctggaactgcatgtagagcagggcgcatcccttgataaaaaagggattccggttggggttgtatcatccatcgccggcgtaagccgctatgaaattaccatcaaaggcgaggcaaaccacgcaggaagcacggtgatgaatgacaggaaggatgcgctggtggcaagcgcaagattcatcgacaaggttccaaagatcgtggaagagtatggaaaccaatatacggtggctaccgtgggaacgatgaaggtggttcccaattcggtgaatgtcattccgggagagtgcatctttaatctggagatccgggatcaggacgcagggatcatcgacctgatcgaaggcaagttaaaagaacatcttgatcaggtatgtaaggagatggaggaagaatatcggtttgagcgtttttcctatcatgagcctgcgccgatggcagattgggtaaaagaagcgatcgaggcgtcagtgaagaagctgggagtcgagtatgcgatcatcccaagcggagcattccacgattcgctggtgatgacaaacgtattccccaccggcatgatcttcgtgccaagcgtaggcggaatcagccactccagacatgaatatacggcagatgaggacatccggcagggctgccaggtgctccttgagacgattcttaaagtagataacatgaccccatcatgttaaaaaatagtaaaacaaaggcaaaccaaaaaagaaaggaaggcaatgctatggaaaagaaaagaattggtattattggcggaggaatttcaggaacatgtctcggatatcatctgagcctatatgataatgcggaggtagtcgtattcgagaaagacaccatcggaggagcatccactgcaaaatcagcaggaaccgtatgcctcttcgatgattcattaagaaacagatactgggatgtaagattatacggattcgagtcttaccttaagatggaagcagaagaaaaaggctctgcgggatttgacaagaccggcaccctggtagtggcaaccgatgaaaaggtagaggctaccatcaagacaggaatcgcattggctaaggcggctggctatacaggagaatatattaccgacaaagacagaatcaaagatatccttccggacatttccacagagaacatcttgggagcaggatacacgcaggatgacggatactttgacggtaccatgatctccaatacatatgcaaagaaaatgcagaaaaacggcggcattatcaagactggcgtaaaagttacggaagtcaaggtagagaataacaagatcaaaggacttaagaccagcgaaggagaagactatgaatttgactatgtcgttgactgtacaggaccttggagcaaattcaccggtgaaatggtaggcatggatgtaccgatctggcatacaaaggcagaagcattcttcctctgccctccgggaaagaaattaggatacaccttcccagtactgaaatatcctgcattctacgcgttaagggcaggggacaacatctttatctgcaagtcccacctttcgatggatctgaacaatccgatgcatgcaggacagtgggatccggacaaacttccggcaacaggcggaacagacgactacttcatcgacttcctgcttgaccagctggaatgcagagtacctggaatcgtagacagcggactggtatcttcatggctgtcctatcgcgcggagccaaaagacttccttccaattttaggagagactcctgtagaaggatatgttcttgctacaggatacggcggaaacggtgtcatcgaagcaccggcagccagcagagaccttgcaaaattcatcatgcgcggagagaagactccattgttagaagactgggcatttgaacgtctgttaaaataaatacgtgtaacagagaggagaaaatatgaatatagcagttcttataaaacaggttcctgtttccaatgacgtttccgttgatccggaaacccacgctctggttcgtgcaagttcggaaggaatgatcaatcccgcggatttgaacgccatagaggcggcaatggtcttaaaagagcagacagaaggaaaagtcgtagtatttacgatgggacctccggacgcagagaaggctttaagagatgctatggctatgggctgtgatgagagttgtctcattacagacagatgcctggcaggaggagataccattgctactgcaaaggtccttgccagaagcattgagaaatttggaaaatttgacctgatattaagcggtgcattatccgcggatggagccaccggacaggtgggagctatggtagcggaatatatggggattcctcacgtatctgagattcagggaatcgcatacgatgagaacatggcggacagcattatcgccactaagaaggcccagggaatggaatggaagatcaaggcttcattgccggcgcttatgagcgtatgcttcggctgcaacgagccgcgcctggctacccttcgtaccaagagggcagccaagagcaagccgatggaggtgtacaccaacgcaaaacttcagatggacgcaagcgagatcgggcttgcaggatcgccaacggtagtcaccgactccttcgtgcccgagagtaccagaagagccgagatgcttaccggaactccggaagaactggcgcgcaagctgcaggagttaatcgagattgagaaaggaaaagaataaatggctagtggaatttgtgttttcgcagaaaattataatggtaatatagaatctgtcgtggcagaactggttcgtgcagcacatttcattaaagagacaaccggcgagaagatacaggctgttgtcgtggccaaggactgtgatcatctcgtaaaacaattggaacagtttggcatagatgaagtatatgctgtcaaggcagacagagaatgtgcattccaggatgatgcgctaagccaggtgatcgctgagatgattcagagaatcgacccgtcaagcgtgctgattccggcaaccccaacggggcgctccatcttctcaagagttgctgcacgcttaggctgcgggcttacagcggactgcacagagttattggtagatgcacgggaggacaacaccttttatatcaaacagaataaaccttccttcggagaaaatgttttcgtcacgattgtgacaaaagaaggattctacccccagatgatgacggtaaggccgggcgtgtataggccatatgaggccgccgaagatagaaaggcagaggtcatatattttgacgatattgcccttccggaatctaaaatagaggtaatcgagtctgttctggcatccaatgagaccgatagcatcctctcggcagaagtcgtggttgtaggaggccgaggagcagaaagcgaggaaaacttcgcgctgttaaaagcattcgccgataagcttggtgcggcaatcgggggcacaaggccgctggcagacacaggcttcattccgttcgagcatcagatcggacagaccggattcaccatccgtccgaagatctgcatctcccttggagtatccggagccatacagcatacagaaggaattaaagacacaaaattatttgtggcgatcaacctggatgaaggcgctccaattttcaatgtatccgactatggcatcattggggatatgaaagaggtgctgaaatcctacctgaaactgtaatcaaccctccaatcgatatagcagataaaatcagaaaaagatatcttgacacggatatctttttctggtgtaactataagtagaaagcaaggaaaggatgatatttatggatttattagaaattatgagaaagagacgcagcatcagaagttatacgcaggagcagattccggaagagagcctgatgaagatcctacaggcaggccttctgtccgaatcagggaaagcaaaacgcccctgggagttcattgttgtccgtgataaggaaacgcttgcatacctgtccggctgcagggcaggcggcgtgaaaatgctcaaagaggcgcagtgcgccatcgtggtgatcggtgacgcaaaagagcaggatgtctgggtggaggattgctccgtggcaatggctcacatgcatctgatggcatccagcctggatataggcagctgctggattcagggaaggctcagagagtcggatgaaaagactacggaagaatacgtcagagaaaaactaggattcccggagcattataagttagaagcaatcctgtctcttggcatgccggcagttaaaatgccagcctaccagttggaagaacttcctatggagaaagtaaagtgggagaagttttaggggatggctttggatgcggacggcagggaggatttcccttccggctcccttcgccggggaagtataagcagaaaggccctgaaatgtaagtatacggattttatctcaaataaaatccgtatacttacatttcagggcctttctgctaacactttccaacggcttgcccgacagaaaggaaatcctcccgcccccttataacaccggctcacaccaaaaggctaaaatgagaaatggacatgtggccgggaatggattaaaatagatattactggtgcagttactgcatctggaagaggaggagacgggtatgcgtaggaaagaccgggaagtgacggatattgaaaagatagaggagatactggatgcctgcaaggtgagcaggattggccttatggatcagggaaagatctatatcgtgccgatgaaccatggctacagcctggaggatggccggctggtattgtattaccatggagccaatgaagggaagaaactggaactggtgaaggagaatccgcaggtgggattcgagatggattgcggccatgaactggtggagggaaggctggcctgccagcacagttatcattatgccagcatcataggaaatggcgaggccagagttattacggaaccggaagagaagttgaaggcactggcagtaattatgaagcatcagacgggaaaggagtttcaagaatttgagacgaatccaagacttgaaaaggccgtatcaatcataaaagtagaggtaggggaatatacctgtaaacgttatggcaaatgatagaaaatgatttttgtatggttttcgcaaattaatgctttaacttgcgaaagtaatgtgctatacttaacaggtaacagacgtagtttgcattttgcgcctgcttttcaatagagtaaggggaaggttccctttgggatgaaggaggaaataacatgatttgggcgaaggaagaaaccctgccaagagttgagattgagagcatccagcttaagcgactgaaggagacggtacactatatctacgacagagtagagccttatcgcaggaaaatggaagaagcagggataaaacccgatgatatccagagtctggatgatttaaaggagatgccatttacatataaagcagactttagagacaattatccaatgggattatttgcagtagataagaaggaactggtacggttccatgccagttcggggacaaccggaaagccgacggtggtaggatataccaggaaggatctggatgtctggctgaataatgtagccagaatcgcgtgcatgggcggcgcaacgccgaatgacgtggcacagatcgcattcggctatggaacctttacaggagcgttaggactacatggcggcttagagaaactgggggcatccgtaatcccaatgtcatccggcaataccaagaagcagatcatgttcatgcaggatataggcacgacgcttctggtcgcaaccccttcctatgcgctgcatcttggagaggagatacgggccaggggcctggagccgtcaaaagatctgagggtgcatattggattatttggcggagaaggcatgacggaacctatgcgggatgagatgcacaaggtctggggagagcagttcttctgcacccagaactatggcatgagcgaactatgcggccccggtgtggcgggtgaatgtgaagagttatgcggcatgcatatcaatgaagactggtttatcccggaagtgatcaatcccgagacaggcgaggtacttcctccgggagagcggggagaactggtcgtgacctgtctgggaaaggaagcgatccctttgatccgctatcggaccggagacttgacccggctgttctatgagccttgcaaatgcggcaggacgactgcgcgtatggagaacctctcaggccgggccgacgatatgctggtgatcagaggcgtcaacgtattcccgacacagattgaagaagtgcttctgcagattcaggagatcgggcctcattatgagattctcgtggagcggaagaatcgcctggatgtcatgacgattacggtagaactggtagatgacagactgcttgacagttatgcgcagttaagcgagctggaacagaagattaagaaggggctgaaagcacagcttggccttgcaacccatattaagctggttgcgccatattccctgcagagatttgaagggaaagcaaagagagtgacagatttacgaaaggatggattataagatgtcggagaataagaaagtagttatgctgggcaacgaagcgattgccagaggggcatacgaggcgggcgtgaaagtatccgctgcctacccgggaacgccaagcacggagatcagcgaatatctggtacagtacaaagatgatttatattgcgaatggtcgccgaatgagaaggttgccacagaggtagcgatcggcgcgtccgtagtaggcgtacgctctatggcctgtatgaagcatgtggggttcaatgtggctgccgatccggcttacaccgtgtcctatatgggcgtgaacggaggcctcgtcatcgtcgtcgcagacgatccgggactttacagttcccagaatgagcaggataccagaatggtggcaagagcggcacaactgccggtactggagccgtccgacagcgcggaggcaaaagattacatcaaagtggcttatgagttaagcgagaaatatgaccgtccattcgtattccgcatcactacgaggctggcgcattcccaggggctggtagaacttaaggatcgtgtaacgatagaagataaggaatatgtaaaagatgtcaagaagacggttatgatgccaggcaatgcaaaactgcgccatgtagagattgagaagcggaacctggaactggcggaggctgccgagatgctttctatcaatacggttgagatgaaagatacgaagatcggagtcattacgagcggaattccttatcagtatgtgaaggaagcgctgccagatgcctcggtattgaagcttggaatggtgaacccgcttccaagaaagatgattgaagattttgcgtctaaggttgataccctctatattgtagaagaactggatccggttattgaagaacaggtgaaatcctgggggatcaaggcaatcgggaaagagatctttaccgtgcagggcgaatacagcgcgaatatgattcgaagggcgattctgaaagaagaactggacatagaccagccagctaagatccctggaagacctccgattctgtgtccgggatgtccgcacagaagcgtatattacgtgctgaagaaactgaacatgcatgcggcgggagacattggatgctataccttaggggcggttcctccgcttagcaccgttgatacgacgatctgcatgggagctagcatttccagcctgcatggaatggaaaaggcaaaaggcaaagagtatatcaagaactgggtagcggtaatcggcgattctacgttcttacatacaggcgtgaactctctgatgaacatgatgtataacaacgcgaccggaacggttatgatcctggataactcaaccaccggaatgaccggacatcaggaccacgcggcaaccggaaagaccttgcagggagacgccacctacgcgattgacattccggcgctctgccatgcgataggcgtgaagaatgtgacggaagtcaatgcattcgacatagagcagcttgaaaaagtcataaaagaagaagtggcgaaggatgaagtctccgtcatcattacgaagtcaccttgcgtactgcttagcaaggcgaagaagccggtatatatcgcccatgaggataagtgcaagaagtgcggcatgtgcatgaagccgggatgtcctgcaatgaccaggaagccggatggaacgatctacattgacgatacgatgtgtacaggatgcgggctttgcgagagcctgtgcaagtttggcgcgattgaattagtaaaggcaggtgacagataatggctacaaaaaatattatgattgttggagtcggaggacaaggaacgctgcttaccagcagaattttaggcggccttgccattgccagagggctggatgtaaaactttcagaagtacacggcatggcacagcgaggcggaagcgtagttacattcgtccgctatggcgagaatgtggcggagcctatcgtggaagaagggcaggcagatgtcatcattgcctttgaaaggctggaggctatgagatatgcgcactacctcaaaaagggaggagtgctgatcgtcaatgactggagaatcgaccctatctcggttgttatcggggcagccgagtatccggaagatattatagatacattaaaagagaattacaaggtctataccgtaaatgccacggaggaggctaagaaactgggcaattcaagagtatttaacttgatcgtgcttggaatcgcggcgcagcacatggagttttccctggatgaatggtatgacgttattgagaagaccgtgccatcaaaaacgattgacataaacagacaagcgtttgatgttggatatcaattataaggaggtgtcatatgatcaggcaactatcagtattcgtggagaacaagccgggcagccttatggatgttacgtcaaagcttaccgaagcgcacgtcaatatccgggctgtagcgacttttgatacaccggaatttgggatccttcgtctcgtagtagataagccagcagaggcgaagggttacttgactgagcggggatttgtcgtaagagtccatgaggtcatgggcgtggaattagaagataagaaaggcaatctcaatcagatgttggcaatacttgccgatggcaagatcaatattaactacatctattcatttgtgatccgcgaagggaaagcgccggttatggtatttaacacggatgattttgagaaagcagctcagattcttaaggaagcaaatgtgaagatcgtagaagaatcagatttataaaattaagaataggagtaggaagaacatgggaggagtagcattaaaagactggaaagaacagatcagagatcccaaaattgaatgtatgagcagggatgagatgtccgcgcttcagagcgagcgtctcgtaaaacaggtaaagaacgtctatgaaaatgtagagttctaccgcaagaagatggatgatctgggcgtggagcctggagatataaaaggaatagaagacattaacaaacttccatttacgacgaaggaggacttaagggacaattatccattcgggcttctggcagttcctcaggaaaagattgtaagagtacaggggacatctggaaccaccggcaagcttaccctggcttcctatacccagaaggacgtggacgtatggggcgagtgcgtggccagagggcttacaatggcagggcttgatgcaacggaccgcatccatgtgtgctatggatatgggctctttacaggaggcatgggactggactttggagcaaaggcactgggggctatggcaattccgatgtcagccggcaatacgaagcgccagctgatgtgcatggaagacttcggggcaaccgcatttgcctgcacgccttcttatgcgctgtatctggctgaggcagcagaggaagcaggcgttgtagaccatcttcagttaaaagccagcattaacggcgcagagccgtggacggatgagatgcgtaagaagattgagggaatcctccacatcaacagttttgatatctatgggctgtgcgagattaccggacctggcgttgccatggactgcatccaccataaaggactgcatgtatatgaagattatttctatccggagatcctgaatccggctgaccataccgcatgcgcggacggtgagacaggagaacttgtcttcaccactcttgccaaagaaggcatgccgttaattcgctacaggactaaagatttgacgagcattgagtacagcatctgcgagtgcggaagaacgcttccgagaatccagaagtttaccggacggacggatgacatgaaggttatccgcggcgtcaatgtattcccgacacaggttgagacagctcttctttctatgggcggcggcgtagcgcctcactacatgctgattgtagaccgggagaataacctggacgtacttacggtaatggtagaggttgacgagaagtacttctcagatgagatccgtaagctggatgaacttaagaacagagtcggggccgtattaaaacaggcattgggcctggcagtaaaagtaaaactcgtagagcctaagacaatccagagaagcgaaggcaaggcaaaacgtgtaattgacaacagagacctgtaaaaggaggggaatagaagatgggtatgagcaatacgattcagcagttatcagtatttatggaaaatagggaaggacgtctggatgagatactaaagatcctttcagaggcaggcgtcaatatcgtggcacttagcctggcagacacctcagagtacggcatgctccgcatgatcgtatcagatccgcacaagggacgcgcggcgctgaaaaatgaaggaatcaccgccatgctgacggatgtggtggcgcttagggttccacatgccacaggctccctcagcaaagcaatgcaccagattgtagagggagaagtaaatatcgagtatatgtatgcatttgccaacggaagcgatgctgcggcagtgcttaagagcgatgatccagcgagagtaatcgatatcctaaaaggcagcgggttcgacgtatacagcgcggacgaggcatacagggctaatatgtaagaatggtttttaatcaaaaagatatcaatatatcagattttagcagatccattaagagttgtcgggcatcttcgtaaagtttcttaagagggacgttttcggaatgcccttcattgatgaatcccaccatgccatagcagaggaagccggcgattctctggggagaatactttaacttcatgacccggctttctttggcggtatgcatttctaccgtctgaagcacatagttgtagaaactgaaggccagatggggattctcgtcaggagccgtgtggcggaagaaatccagattgtcgtagaacaggatcaggatgctgtccagcacgttgcagtagctgaccacaggatccatctgctggttattttctatctgcatgccttcgtaaatcttcgttccggcctcaatcatgtccatgaaaatatcgtctgccagagcatatttatcactgtaatgggtatagaatgtaatgcggctcgtgtctgcacgggtgcacagttcggtgacggagatacgttcaaaaggcatatcctgaagcatgtctatcaaagtgcgtttgagatttctctttgtcttctttatgcggcgatcttccataagtttacacttccttgaatttgtataaataactgacagatcccggaatttgtcaattgttaagaaaccgggcactgtgctataattttaacacgtgtaataataatggtcaacgtgtaaaggaaacagatgaggttatcaggaggttaagatgtctgatattgcagtaatgacagacagtaattgtggattgatgccggaagaaggcaggagatatggaatctgcattttgcctatgccggtattgatagacggaaatacatattatgaaggagtagacattacgtcagagatgttttacgaaaagcagaaggcaggcgccttgattacttcgtcccagccttcgcctggagacgtgatggggatgtgggaccggcttcttaaggagcatgacgaggtggtatatattccgatgtccagcgggcttagccagtcctgtgcaagcagcatgtcgttcgctagggaggaaaagtataaagatcgcgtatttgtggtggataaccatagaatatcggtgacgcttacccacgccgtgctggatgcgcttaatctggcaaagcaagggaagagcggtgcgaagatcaaagagattctcgagcaggaagccatggattccaccatctatattgctgtggatacgctggaatatctcaagagaggcggaagggtgaccgcggccggcgcggctatcggaacggctcttaatattaagccggtgcttacgatacaaggagacaagctggatgcatttgctaaggtaagaggaatgaagtcggcatttcgcaccatgtgcaaggcgcttcataaggatatagagaccagattctcacatctgtatgaaaaagggctgcttcaattgggaattgccaacacgtggatggatacggaagcgatagaaagatggaagcaggcgctgactttagaatttccgggaatggaactgacccatataccgctgacgctcagcatcggctgccatacaggcccgggggctctgggaatcggaactgtcagaaaacatgtactatgaaaggaacttcagcctatgatagaaaaggctggagtttttacttttcttaccgcaatattcatgttatcctagaaagaaatagtaagaattatgcctgaaaaggccgtctgaaaagggggcaaccacaggttgacaaattaccaagcgctgttttcttgtggattggacagacatctactattctatatgcatcaaaaggaaaaggcagggaaactatatggaattttctgagaaattaatacagcttagaaggaaacaggggatgtcccaggagcagttagcggatcgtctggggatcacgcgccagtctgtcagcaaatgggaatccggcagcgccgcgccggaattatccaaattaatcacgctgtcagagatgttccaagtgagcatagactacctggtaaaagatgccgaagaaccgaaaggggcagagaaagaagaaagcaggcgcttggaagaaaaggtggacaacatcgtccggtatatgaaaggatatcattacacaagcaaggccatgataaaaggcgtgccttttgtatgcgtccggctatccaggcggctcggtaaggaaggggtggcgaaagggattattgccgtcggaaacgtggccattggcgtgctgtcgtttggctgcatctccgtgggagtcatcagcattggctgcctgggcttcggaattctggcattggggtgcatcgccgttggcttgatggccctaggggcaatggcagccggaatcgtagcgatcggttccctggcgatcgggatctatgcggctggcgcggcggcgtttggaaaagaagtcgcgataggagccgctgcacatggaaatacagtgattggagagtccgtgaagggggcacattgcctcagatggtacagcggacttagcgcagaggaggccgagcggtttattctggaaagccatccccgcctgtggagtcctctgcttaagtttctcgccgcaatagccggcagcatgggaagataagggataaggctatgaaaaaagaggagataaggatgaattttttagaagaacgtatattgaaggatggaattgtaaaagatggaaatgtgctcaaggtggacagtttcctgaatcatcagatggatatcgctctgtttaatgagattggaaaggaattcaagaaacgattcaaaggaaataagattaataagatccttaccatcgaagcgtccgggatcggaatcgcctgcatcgtggcacagcatttcgacgtgccggtggtgtttgccaaaaaggctaagagcatcaatctggaaggcgagatgtatgtggcggaggtagagtcgtttacccataattgcaagaatcaggtgatcgtagcccagaagttcctcggtgaaaaagaccatgtcctgatcattgatgatttcctggcaaatggctgcgcgcttcagggactgatccagatcgtgcagtccgcgaaagccacggtggagggaatagggatcgccgtggaaaaaggcttccagccagggggaaggatcatccggaatctgggaatccagctggaatcgctggcgatcgtggaacgcatggattctacgaccggcgagattgaattcagagtgcaagaaggatagaaagaagatggaaaagacaatcttagtggtggaggatgaccggggacttaaccagggtgtggctatggcccttaaaaatccacagtatcatttcctgctggcttatacattgaaagaagcctttgaatactggaaggacgatcagatcgacatggtcattctggacatcaatctgccagatggtagcggctatggattcttagagtccgtacggaaggaatcgcagattcctgtgatcatgctgacagccaatgacatggagatcgacgaagtgcgaggcatcgagatgggtgcggatgattacattacgtagcctttcagtctgatggtccttcgggccagagtagagcgcctgtttgccagagtgggcagacaggaaggcaaggagtatcaagaggaaggataccgattttcctttgaccgccaggaatttgctgtggagggaagacctgttgaattaagccggacggaacagaaacttctgcggatgctggttacgcgtccgggacagacgcttaccagagagattctcaatgaggggatctggcaggaaggctcggactatatagatgagaatgctttgtcagttactgtggcaaggcttaggaagaaacttaaactttcgcaagaggaatgtccgatacgtacggtttatggaataggctacgtgtgggagagagggaaggagaaatgagcattttgaggaccgggaggacgcttaagcgtttggatgagatgctgacagaagcaatcgagggaaggtttgaagagggaaaatacgatgagacagaactttccaggctggaatcccggtggaaggagtatctgaccacatccaaactgtcggtagaagcagccagaagggagaggacggatatcaagtctatcctgtccgacatctctcatcagacgaagacgccgctttcgaacatcattctatatagcgaactgctaaaggagcagccgcttaccccggaggggctggagattgcggaacagcttggcggtcaggctaaaaaattggaattcctaatccaggcactggtcaagatgtcccggctggaaagcgatattctggaagtaaagcctaaaaagcagcctctggcgccgctggtggagcgggccgtaagggacgtatcatccaaagccaagaagaaatctattacgattaagcaggaaccattcggcgagattcaggcagtgtatgatttgaaatggccccgggaggcgctgtttaatatccttgacaacggcgtgaaatattctccgcccgggagcgccatcacaataagcgtgaaaacttacgagatgcatgtctgcatccaggtggaagacgagggcccggggataccggaagaagaacggaccaagatctttcagcggttttaccgcagggaagtcaaccagcaggaagaaggcgtaggcatcggcctgtacctggcccgggagatcctcagaaaggaagacggatatatcaagacaggctcggggcacggaaaaggaacggtcttcgggatatatctgggaattgatgaattctttcagaattgttagaatccggacagaatgtggtaagacttatcctgtaatatgttagatagcaaaggagattgtacttcagtgcagtctccttttcttaaaaaagaagcaggaggcgttatgtaatggcaatattgaagacagaaaacctgaagaaatattatgggaaagatacgacactggtgaaggccctaaacggggtggacttggaagtggaaaaaggagagttcctgtccatcgtgggaaccagcggctcgggaaagtctacgctccttcatatgctgggaggcctggaccgtcctaccagcggcaaggtatatgtagatggcaaggacatcttcaagctaaaggatgaagaactgaccatcttccgcagaagaaagattggcttcgtgttccagaactataatctggtccctatattaaatgtatatgagaacatcgtgctgccaatggagctggatggaacccgggtggatcaaaaatatgtaaaagaggttataaaaacgttgggattgcaggaaaagatctacagccttccatcccagctctccggcggtcagcagcagagggttgccatcgcccgggcgctggcggcaaagccagccatcatcctggcagacgtaaactgtacccattgtacttgctgtgcatagagtatatacagtcagaaaacatgggaatataggtacaggatacacaggtgataagaaaatatgtgtatatagtgaataaaagatttgagtatgattggtattggaaaggaaatccaagaaccagtctttttttatgaatatggaaggattgttgtgtaattgggaacaaagggaaaagtcgttgtatagttgtaccagatccagagcgaagttttttagtaagtttaatgaatagctttttatgagaattatggtaaagtgttggctggaaaagtaaaagggaaggagtgagaataatcaaaaatgctattcaaaaaattccttggataaaagaatcagatatggatgtggataaacgaattgttgaatatctaaaagagcataatcaggaatatatggatttaggaaaagaagttgataaaattcttgatgattatccaattttgtcacagcttttagataaggaaaatgcaattacattgacggaagagcagcacaaagcataccgaaaatatattttcctgaaggaagatatggaaaatttggagcggagtggaagataccttatgggacaggcagacatgataccttacatgattgtgatgagtcaaatggaaaggaagctggaaaaagataatggaaactataaagaattgaaaaagacacaaaaggatttgtttatgaagggattacgtgatggatataagctggcacagattttgaaagaagaatagatatttgtttcttctggataagagagccgaggccgccagagagcgcaagatgttccggtataaggcgttttactccctcgattgtaacgatggaatcgaaaatgccgctatcggctgggcacagccatcgccggaggatcatctgatagaaaaagaagaattagccgaatacgaagaactgatacggcggttgtatgaagccatttcttctctgccgcctatgcaggcccgccgtgtccacgcccgctatatgctgggtatgaaagtgaaagatattgccgcaatggagggcatcacgccatcacaggcgggaaaatccatccacgccgcactgcggaggctgcgccggtactttgcgtgtcggaaatggacggtcaatctatgagcgtttccaaagaaaagaggtacatgatatgaacgaaaaaaatacagcccaaaccccaaaagaggaacgggaggaagtcctgaaggagatccggcagcttgaaaaccgcaagaagattttggagaatacaagggaaccggaaaccctcatgtccatatcatgctgacgctccggcctctgaaagaaaatggacagtggggcgcaaagtgccgcaaggcatacgatctggacgagaatggacagcgtatcccggatgggaaaggcggctggaaaaatcatcgggaggatacgaccgactggaacgataaagggaatgtggagatttggcgggcagcgtgggcggcctacaccaatcgggcgctggaatctgccgacagaccagagcgcattgaccaccgcagctacaagcggcagggcattgataaaattccctctgtccatctggggccagctgccagtcaaatggaaaagcgcggcatccgcaccgacaagggggaagtaaaccggcagattgctgctgacaacaagctgctgaaagaaatcaaagcccgtattacccgcctttatcgctggtcgaaagcggaaacggaaaaaccacaaacacagcaaagtagcttgaccgccttatgggaagcccagcagcagttgaacgctccccgcacccgcaccggcaaaatccgggctttgcaggaaagcgccgcactattcagctttttgcaggcaaacggcatccagtctatgcagcggcttcatgaaaaaatctctgatatgaacagtcattactatgacctgcggggaaagatcgtcaaggccgagcgccggatcgccacccttaccgagcgcggagagatgtgggaacagtacaaccagtacaagtccatccacaagtagcttgccaaagtaaagccggaaaagcgggaacagtttgagcagcgccacagccggaaactgatcctgtatgacgcagcagccaggtatttgaaagaattgaaagacagcggcgaggcaatcaccccgaaggcatggcagcgggagatcgaccagctggccgccggaaagcagacggacacgcttgccatgaaatccatgcgggaggatttgaaggcagtggaacggctccgcaaaaccgccgagcagctgtcccggcaggaacgaaacaagtctcacgaccgggagccggagcggtaagggctaccgcgttttggcgtacccctgtcaagggcgtcgcgtttcacgacatccttttgcacatagaaaaaccgccgtacaggtttccccatacggcggcagactgtttatttgccgaacaagtcgctgtgtgtgccggtgcgggccagcgtcagcaccagaacatcatcctctatgcggtagacaagcagccagtccgggagaatatgacattcccgatgtcctgcccaatcgccggacaggtcatggtcacggttcttatccggcagcggttcgcccatcgccagcagtgctacgacctgctccagcagctcgatcttcaagccacgctttatggctcgtttgtagtcttttttgaaactagtcgtgtacttgacggtatatttggtttctctcatcttttcaggtcagcaaacaactcgtcaaggtcattgtagccctttacagacgggtcttttgcaatcctttccgcttccagcatggcagcaaccgtttctttgttcggctgttccagccttacttcaaagggaatgccgccctcacgaagcgactggcgcacaaagatgttaaacgccgtagtcaggttcatgccaagttccgaaaacagtgcgtccgcctgggctttcaaatctgcgtccatgcggatactgatgtttgtggtatttccagccatacgatcaacccctttctgctggcaattatagtatatgccatttgcacgaagaaaacaatactttgcacgaatatttaacaataaattcattcaaggaggttacacgctttatgcaagaaatcactttacctgtcacgatccatctgaatatccgcctgcttcctcctctggtgcagccggaaccggcagatacggacagccgcccggaggctcaacactgccacagctgcggtggatgtggaaactgccgctatgaagaacagcaagactgaagctatccccgtcatggattaccaccagtatcgcagagcgcggaggctggtgcatgagtgctgcaactacatcgacggaaactgtatcgccctggacgatggggaggaatgtgtctgtgtccagtctatttcctactccctgttgtgcaggtggtttcgggcggcagtgctgccgcaagataaggaactggaaacggctctgttctatcggctgaatgctaagaaatgcgccgtatgcggggcgctgtttacccccggttctaaccgggccaaatactgcccggaatgtgccgcgcgcatgaagcggatcaacgccgcaaagcgcaagcggaaacaacgggctaaatgtcacgctttaggggctgaaaaacccttgtaaatcaaggcttttttcgagggtgtcaaaggcagtctgatagatttatcctctgacccctaaaatgtccttaaaatgcgtacagaatcccaagagaacccccaaggaggaaccctatgtcagacaatcgaaaatattattacctgaaactcaaagaaaactattttgacgatgattccatcgtgctgctggaaagtatgcaggacggtgtgctgtattctaacattctgctcaagctgtatctgaaatcgctgaaacatggcggacggctccagcttgacgaggacatcccttacacggcgcagatgattgccaccatcacccgccagcagatcggcactgtggagagagccttgcaaatctttctgaagctggggcttgtggaagtgctggacagcggcacattctacatgagcaacatcgaacttttgataggccagtcctctaccgaggccgagcgaaagcgggctgcgaggcttcaaaataaggcgctttctgcacccggacaagcggcggacatttgtccgacattcgtccaccagagatagagatagagttagagaaagagttagagaaagagaaagagatagagatggacaagctgaagctctcgcttcagggatataattacgggaatggatacataacatgggcaatccggaatcatggaggctacagtgcggccaacgctctgcagttttctcaggaacaggctgccgctcatggatgggaacggtatggagatccggagtatgtgcctcatgttttaagatattattcgggtggaggtctgtttgccggactattcggaaaccagcagatcgttaccatagcaaagagccagcttggaaatgaaggcggtcagaagttctggtcgtggtggggatttacccagagggaagaatggtgtgcctgctttgtcagttggtgtgcggaacaggcaggactacttcaaaatggagcagtaccgaggttttcgtattgcccggatggagtggactggtttcaggcgcaggggaaatggcaggcggcagggagtattccagcagcgggaagtattatcttttttgactgggatcatgatggcgtcagtgatcatgtaggaatcgtggaaagctgtgatggaacgacagtctatacggtggaaggaaactttggggatgcggttgaggagaatagttatacggttcaatcaacatctatcatgggatatggaattgttggaactaagtaatcgatttattagggagtagcaaaagaaaagacctgaacatgaataggaaattttcactacaaaaggcaataaaaaatgtagcgtgccggaaaagtttttagtataatttaaatgaaattttttgtagtgagggtaatacgatgatacatgtagcgatttgtgatgatgaaaaagaatttgtatcagaaatgagaggattgatagagcgttattcggaagaaaagcagaatgaaattcgtatttcttcttttgcgaatggtttggaattaatggagcattatgataaaactatagatttgatttttcttgatatacagatgaagggaatggatggattaaaagcagcagaaaagatccgccaacaggatgaggaagttggtattatattccttacatctttaaaacaatatgcattggagggatacaaatatcgggcagtaaattatattgtgaaaccgatgaaatatattcgattgaaggttgagctggatcggtggatagagaggtttcggaacaaaaatccgcatattgtagtaacaaacgatagtggtacatttaaggtaatgctgaatacacttcattatgtggaaacatataagagaaatcttttattacatacggatgatggagaagtaatttcatattaaaatatgaaggaactggaaaaagagttagtaccttatgggttttatcggtgtcatgtgggatttcttgtaaatatggagtttgtaaaacgagtagagaagttgaatatagaattaacttctggtgaaaccatttatgccagcaaacccaaaaagaaggaatttatggaagcaatggctgagtattgggggaaaaggctgtgatcgttttagaaactttataccggttgatagacttactttatactatggtgttattgcttattttttgtgaaacactgactattcgcaaaaataaaattttgcagatattagcactttgccttttatggtttataggaactgtgccgatatattctcatgatgtgagaagcgtgattattgccttagttgaatttattgtatttttggcgattttcttcaatgacgggtgggttaaaaaagttttgatgctttcatttttttatccattcattgtttcgataaattatttgatgataaatttttctgagagaatattctatgcagttactagtgtagagcggacagcagactggacgcaagaagtaattttgatagataagagtattatttgttcattttcttttgttcggctcctgctagggattggtttttatttatatttgcgtagatatttaagagaaatttcggaaatgatgccagataagatttggaaagtcttggctacgatattgataatgccgctttcttcaattctaggaatagtttatttctttccagaaggaacggtattcttatatccgatttgtatcgtaactataattactgaatttgcatgcatttatctttcggcttatatctgcagaaagatagtatctgaaaatgaagctcgtgaattgagaatgaagcaggtgttttatgaagaacgtctaaaagaagaagatcgtattcgttcaatttatcatgatctgaaaaatcatttgttaattttacaatcgagggtaactaatggagaagaaactcaggaaatgattcaatctttacagaaacaaatatcagattatgagaattatgtagaaacagggaattcctttttagatgtgatatttcgggataaaatgaaaatggcgaaagagaagaacattgattttcattctgagattgatttttctaaaggagattttttagatggtctgagtgttagcaccatatttggaaatgctttggacaatgcgatagaagcgtgtgaaaaaatttctgaagaagagcgttttattactgttagaggcagtgtagaacaaagtttccttgccatccagattgaaaatgctgcgtgtcagaatgattgcggacagagtgtgaatactacaaaaagtgataagttcctgcatggctttggaaaacagaatattcaaagggcagtagaaaaatatgatggtaatgttgcatgggggtataaagacggaatttatacgttgtctatcctgattcctctggcgaagtaaaataaaatattgaatgcagataagctgtatacggttcagtcgtatatggcttttctttatgaaaaattatgagaggtcaaattgcgcattgtagaggtcaaacaacgcatctggcattgaaaaattctgctgaaaaaatatactgaaatcaaagaaactaaaggaggaatatttacatgagcattttggctgcaagagaattaaaaaaatattatggtaagggtgagagccttacaaaagctctggatggagtcagtctggatatagaaaagggagagtttgtagcgattattggagcctctggaagcggaaaatctactctgcttaacatgattgggggattggatatatctacttctgggaaagtaatgattggtgggaaagagatggatcagttgtcagcagatgaattgacggtatttcggcggaggaacattggatttatttttcaaaattacaacttaattccagtattaaacgtgatggagaacattactttgccgattgagttggatggaaagaaaccggataagaagtttattcagcaaattattggattattgggattaacagaaaaggttcagaaaatgccttcccagctttcaggaggtcagcaacagagagtggcaatcgcaagggctctggcaagtaagccgtccattattctcgccgatgaactgactggaaatctggattcggaaactagtgatgaggtgatgaaattattaaagatgactagtgagaaatttcatcagaccatcattatgattactcataatccagagattgcagagcaggcagatcggatgattcggattgcagatgggaaaattgtggaaggggaatgtcatgcgggaagataagaagatacaaaaacaggcaatagtccgtctggtaaaaaagaatttcaagaaaaacaggttaaggaatatagttttaatactggcaattatgctggttacgattttgatgacagttatgtttggcgtaggcatcagtatgatggaaaatatgagtcaggcgaatttgcgtataaagggaactgaggcgaatggacttttactgaatcccggagatagtatggagcggctagaaaatgtcagcgaaatcagccagattggatggcagcaatatgtggctgaggtaaatacaaaagtagaacttcctggaaaaaataaactggttatgactgcatacgatgagatagagtggaaaaaacatattgaatcaactatctcagaacaagaaggggaatatccggaaaatgaaaatgaagtaatgatttctgagtggagtcttgagcagattgggattacagatccagaaataggcatgaaaatacctttttcctttgttactttggatgggaggaagtttgagcaggagttcgtattgagtggttattatcaagattatatttatcgatccggaataacaccaaatagtggaaatacgattgctgcgaattgttattatatcgagcagggaagcagccgcagggctgtaggaaatatagttgtttcagaggcgtttgcaaaaaaatatggcacagcagaaggaatgatgggaacatgccgaatcgatgataggttaaattccgatgaagcattagagttactggcgaaacatactggaagaaaagatatgattgttatcggactcactaaaaatttcggacagacattatctgctgcaattttaccgtttgcctgtgtagtgcttataattattgcaggatattttctcatttacaatgtggtgaatatttcggtgcttcaggaaatgcacatgtatggtcagctaaaaacattgggtgcaacaaccagccagttaaaggcaatcgtaagaaggcagagctggatggtgtcttttatcgggattccattgggacttttgtctggtattgggttttcagttttggctgtaccaactgtaatggagaaaatgacgtcaggaaatggtttcggagaggctcttacgaatcaggtgtctatttctccggtgatttatctattagctgcgttatttgcatttattacggttagcattagtaatcggaaaccagcaaaaatggcggcaagcgtatctccggtggaggcattaaagtatgtagaaagtacagaaaatatgaaatctcataagggaagcagtgggggaaaattgtaccggatggcgtttcggaatgtcttccggaataagaacaggacatttgttacttttacatcattgttctttggcttggtattgtattttatcatcagcacttgtttgtatggtattgactatgaaaagaagtatcaaaaagagataccggattctttcattttaagaaatctgacgtaccagacagatgatagtaacacaattgaagaatattttacgtcggagattatggagaaggtttctgggatggatggcgtggaaagtgttgcagcagactatgtggaaccagtcagatttctgaatgtaacagaagatttggaggcatacgtcaaagagcaggcattgtaccgggaatgtagtgaagatgaggtgaaagaagactttctaggagaggctgttggactttctatgaagcagctacagaaattcagttaccagagtaccttgagtaaggaagaaattcaggagaagttagaaactggtgagggtattttccttattgatttgggtacacaagaatacaaacagatttctggaaaagaagtgaagataactgcaagagatggaaggcgaaatgtcacatatactgttttaggaacattatgcattggaatgaaagataactatgaaaacagttatagggattacggatatgtgaacggggacaattccacatacttttatacctcagaacagggggtaaaacgattgagagaaaatccaagagttcagacactacgggtaaatgtagaggctggaaaagatgcgcagattttttcagaacttcaagacatgtttttaagcgcagagggtatatctatggaatctcagttagagacaaaacaaatgacggaacagggatttggtagtatttatatggccgggatggtattttctgcgttcttgattggaatgggaatgttcaattttgtaaatgtcatcttcacgaatatctatacacgtcaaaaagaactggcaactttagagagcattggaatgacaaggaaacaatctaagaaggtgttaatcatagaaggaatatattacagtatcataacaataggacttctattgacagttggacttctgatttccacattggcgtttcagttggttcaaaaactggtctattttactatgtttgggattccgatagtgcagtttactttggtatttgtttctatgatttttatttgtgctgtggtgccactgttggtgtatcgtaatatttcaaaagagagtattgtagaacgattgagaagagggcaggattgacttaaggcgaaaatagagatggtagtatatggaatatagaattacattttcaggacagggggagtttcttattatttcccccagaatcctgaatacattgattgaaaaaattcataatagcggaaagctggagttatctattcaagtaggggatataatgtcggaatcatatcgggagtatatcctaaatgttatcaacagtaatcgtgaggattcatatttctgtttttctaacataccagagaatccgataaccatgaagcaattgtatcagattacagaagaacagatgaagaatctagatattggaaaagagaaatgttttgagcgtattagacttttggagaaaaaaggaaaattattagagataaattgttcagaagtattctggattgcttgtcaggactcagagtcagtgtttctttatcagtatgcgaatggaatggaagaaaaaatagtgattgaagtggaaaaaaacagaggcgtttaaacgtataaggagacaggtatgatggaaaaaagaataattataattgtaaatacctgtgatttttattttgatagtttagaactattgaatcaatgtgttgaaatatatatatcaaaagggattcaggatgggatatctcacttgagcttattttcctatcatctaatattgattttttttacagagggaatcaggaattatccgtcagcttgtagaaactattcgaaaaatggtattgatcccaattcttgtcctattgccggaaggtgctaaaaaccgagcagagataatacgagctggggcagatgtggtattggaaacaccatatgatttgaaagaagtggagttacaggcgtatgcactgattcgccgatatattatttgggagtcgaaagaaacaggaagtgagagcctcattgagattggttcattaaatatcaacatattgaaaagagttgtgtattggaatcaaatgcaaatagatttagtaaagcgggaatttgatttattatatttgctggcagcgactccggggcgggtatatacatacagccagatctatcaaagcgtatggaaggaatatccgcaggatgatgttacgaatatgatttactgtttggtacatcgcctaaagaagaaactaagaaaaatagatgtcaaagcatgaaggatatccgttattatggcctgcttaagaccattggaaccacggggaggcagattaagcggatcatcaggcggcaggccctgagactgtccctgattggaattccggtcgggctgcttgcgggattctttgtaggaaaagggctggtgccagtcatcatgaaatccctgggagatatggtggaatacagcacggtgccggcaaatccgctgatctttatcggtgcggccatcttttccctggtaacggtattcatttccacggggcatccggccagaatggcagcccgggtatccccgatcgaagcgctgaggtatacggagggaagcaaggcgcgcaaaaaaggaaagcactctttaagcagaggcaggatatggcggatggctttgtcgaatctgggaagaagcaagggaaagacgacgattatcattgcatcgctgtccctggcgatcatccttctaaacagcgtatttacgataacccattcgtttgatatggataagtacctgtaaagttttatgaagcctgattttatcatcgggaacgcaaaacattttggcatggacaattatagaggcaggaacttagaaaccattgatgaggaaaatctgacggagtcgtttatcgaatactgccagggattaaaaggctatgaagatggcggaaggctctacggggcaggttccttcgtgggcgtaaaacagaaaggcatcaccattccttccggaatagaacaagattccagcggaatgcccggggaatactatgggaaagaattcattccatttaacaccaatgagcagggtgattttgaagtgtacctctatggggcagaagactttgccgtaaatgagatgcaggtctgggaaggagtttctatacgctgacgaatatgttcttgcttatcggcggagccttggcttttgtcataggagtaatcggagttttgaattttatcaattccatccttacaggaatcattaccaggcagagagaatttgccatgatggaggccatcggaatgacgaagaggcagctgacaaaaatggtgatcgcagaagggctttattatgccattctgaccgtagtattctcgcttgtggccggcgtcccaatcctgcttgtattaggaggactggtgccttacctggcattccggttcggaagaagggaaaccgtggtagaagaattgcaaaaagaataagcattcgctgtcttccccaaaaaagatttttgttgacacatgtgaaaataatgctatgataacatcatgtgacattccagaatagggggaaaaggctatggattaccaaagaatcgtgcaggggattttggacattggagaagcgatgctaatctgcggagcggaaaatttcaggctggatgacagtctttatagaatgtgcagaagttacggctttaaacgttatgatgtgttcgcgatacccagtaatatccagataactgtagagactccagaaggcgaaattattactcaggtccggcatattgaatctacagatatagattttgacagattggattatctgaataatctatccagatatgtatgccagaataagccggatgaacagacgcttcgtgagaaatacgaagaggtcatgaacaggcagtcccagaagccgtatacgaagtattttgcggcagtaatggggggcaccgggttcgcagtattctttgggtgtaattttgcggatgcaattgttgcagttattgtctcgcttatgattgttatagtcgggggatggctcagcagaagagaagagaatttgatggcctataatatgatactatcttttttgtcggaagttattattatcctggcggtacggatggggcttggcagtcatcctgagagaattatgataggaattgttatgctgctgatcagcggtcttagtaccaccaatggaatccgtgaagtgctgcaaagagactttatatccggtacgttgaacatcatgaattctatgcttggggcggctggcattgcatttggaactgcgcttgcaatgctgttgcttaacggagtgtctgcggaagggtatgtactaaatcataatacttggattcagttgatatcctgtacagtggcctgtattggatttgccttttggtttaaaatccgtgggagacaggtagtctattcaggagtaggggctttttttacatggggaatctatgttgtgatctatcatttctggcctagcaattttttggccacactggttgcagcagtgtttgtggctttttatgcatttatcatgtccagaattaacaaggcaccgtccactatctttttgacggcatccgtattcccgttgattcctggaccgaatttgtattatatgatgtatggctgcgtgagccgtgattatggaatggctcttggtgagacgattgtattgctggctacctgccttgcaattgcttttggctttaatattgtagatattatatcgaggacaatcatgagagtcatgaaaagagagtatcatatcgggaaaaatccacagggccgggaataaagagaacaggtgtcggattatgaatcagccctcccgggaatgattcataattataaaaagacatttgcagacagagaagaaatgttctaaaatggagagagcagcggctgatcatatggaaaataaagtctggccgcagggggtatgaaatgaacgagattgtaaatagaacattatatctggaatgctattccggcatcagcggcgatatgatggctgcagcgcttttggaccttggagcggatcagcaggcgttaaaagatgcacttgagagcctgccgctggaaggcttccggatcgaaatcggcagggtaaagaaatccgggcttgatgcctgcgacttcgcggtgattctggacagcgcccatgaaaaccacgatcatgatatggagtatctgcacggacatggaacggtacatagccatagtcataaaggaagccatgagcaccgtggaatgaaggaaatcctgcatatcatagacaatggcgcaatgacacgggaggcgaaagcaatcgcaaagcgtatctttggcatattggctcaggcagaagccaaagcccacggcgttcctttggaagaggttcatttccatgaagtgggggcagtggattctatcgtggatattatcagcgtcgccgtatgtctggataatcttggaattacggaatgcatcgtccctgtcctgtatgaagggtgcggcaccatccggtgccagcatggcattcttccggtgccggtaccggcggttgcgaatatcgcatccgaacataatctggatctttgcataactgaatccaaaggcgaattcgtaacgcctaccggagcggcaatcgtagcggcaatcaggacagcaaaggagttgccggaaacattttccctaaggaaaataggcataggggccgggaaaagagagtatgacaggcctggaatcctaagagccatgctgattgaagggcaggcgtcttatggcagagactgcatctggaagttggaaaccaatatggatgactgcacgggagaggcgctggggtacgtaatggatcgcctctttgaggccggagccagagatgtaagctatacgcctgtctatatgaagaaaaaccgtccggcttatcagttgaacgtcatctgtacggaagaaaatgtaaagcagatggaacagatcatatttgaagagacgacaaccatcggcatccgcaggcagcagatggagcggagcgtcctcgcgcgcagcatggagacggttcgcacatgcctcggggatgcgcaggtaaaagtatgcgctctgggctcgcagataaggaaatatccggaataccagagtgttgtcagactttgtaaggagcatgatagatcatttcaggaagtttaccagatggtcctttcggagtgtatgaaggaggaagggagtcggacagaagttcctcgttggtaacgcctatcttgtccgggatagagggtatcaaatgcttctgaaatggcatcccagccgggggcctctgagttttcgcctagcaactcttgctgagggggttcgttatcttccttttttcttttgaatttatctaagattcccatacattaatatcctttatatgcttgctgatatatagtttcatgccataacccgctgggtatgaccttatatagaagcataattgggcttatttcttgtgccaagcaggaaagaagtgagatagaaacatttggaattggctaaaccaaataccaaaaataaaaaacaaaaaatgtgcataaaaagcgaaagaataatagtgcataatatataaaaatgttgctttaaattgacaaatattatataaaataatataataatcatacaatgacagaaaaataacaaaaactggtatgaccagaaaaggagttgtgagtgatgggagaattcagggttcttgaaatcaagcagagcgtttttgcggataatgacaggcgtgcaaaggaactgaggaaagaattaaaagaaaagaaggtatttctgctgaaccttatgtcttcgccgggatcaggaaagacgacgactctgtcgcgtacgatcgagcggctgaaagacgagatgaagatcggcgttatggaggcagatatcgattccgatgtggatgcaaagacgattgccagccttggagttaaagcaatccagcttcacaccggaggcatgtgccacctggatgcagatatgacggcacagggacttgccggactggagactggagatgtggaacttgccattctggaaaatgtgggcaatctggtatgcccggcggaatttgatacgggagcggtaaagaatgccatgattctaagcgtgccggagggagacgataagccgcttaaatatccgctcatgttttccatctgcgatgtagtccttattaacaagattgacgtgctgccgtattttgatttcgatatggaagcatgcaggaagaatattctgatgcgtaatcccaatgcacggatcattccaatctgtgcccgtaccggggaaggcatggaggaatggacggactggctgagagatcaggtaaaggaatggaacggatagcggacaaaaagataagcggagaggagagagagaatgtcagaacgaagggaattgattttgcagctgggtcagatgatcacagaccgaataggccataaagtgaccacagaggatccggaatactgggggcttgcctgtatcgtcaccgatgagatggcagaagtagcgttaaagatgaaggtgcgaaagcctatgacgtttgagcagatgctgaaggttacggggaaagaggaaaagaagcttcaggaactgctggatgaaatgagccgggtagggcttatcgaatacaactgggagaatccaaagcgggagaagcaatatgtgcttcccatgttcgtgccaggcagcgcggaattcactaatatgaataagcagcagcttgaagagcatccggaactgggcaggttcttcgagcggatgtccaggcttcctttggagaaggtaacccctatggttcctccgggaggcgcaggcatcggcatgcatgtcataccagtggagaaagccattgagatggagaatcaatccattgatatcgagcatatctcccactggcttaagaaatataatggcaaatacgccgcaagcccctgctcctgccgaatgtcccgccagacttatgatgaaggctgcgccgatgatcccgaagactggtgcatcgcggtaggagatatggcggactatgtggtggagacgaataagggtggaagatatattacatacgacgaagtgatggagattctcaagcgtgcggaggacaacgggttcgtgcatcagattaccaacattgacggcgagaataagatatttgccatctgtaactgcaatgtcaatgtctgttacgcccttcggacttcccaactgtttaatactcccaatatgtcccgctctgcctatgtggcaagagtggagacgcaggactgcgtagcctgcgggcgctgcgtggagtattgtccggcaggcgcggtcaagctgggacagaagctgtgcaccaaggacggtcccgtatcctatccgaagcatgaacttccggatggcgcaaaatggggaccggaaaagtgggatgaggattaccgggataagaaccggatcaattgctatgatactggaacggccccatgcaagaccgcctgtccggcgcacatcgctgtacaggggtatctgaagaaggcagcccagggcaagtacagggacgcgctggcgctgatcaaaaaggagaatccattccccgcagtctgcgggcatgtgtgcaaccgccgatgcgaagatgcttgtacccggggaacggtagaccaggcggtggccatcgacgaagtgaagaagtttatcgcccggcaggatctggaagcagagaaccggtatattccgccaatcgttcctcctacgacaggccgtctgttcgaagagaagatcgcgatcatcggaggcggaccggccggactaagctgcgcattctatctggcagagaagggataccgtccggtcgtattcgagaagaatgagaagccgggaggcatgctggtgtatggcattccatcgtttaagctggaaaaggatgtggtggatgcagagatagagattatccgccagatgggcgttgagatacgctgcggtatcgaggtgggcaaggatatcaccttggatgaactgcgcgcccagggatataaggcattctatcttgccatagggtgccagggcggaagactggcaggcatccctggcgagacggcagagggcgtgatgacggcggtagacttccttcgtaagacgggagcagataagtcctatccggtagagggacgcacggtcgttgtgggcggcggaaatgtagcgatcgatgtggcgcgcaccgcgacaagatgcggcgcttcagaagtgtctatgtattgtctggaaggcagggacattatgccggcatccgcggaggaagtagaggaagcagaggaagaaggaatcgctgtgaactgcggctgggggccaaaagaaatattgacgcaggatggaaaggtcaccggcatcgtattcaagaaatgcctgtctgtgttcaatgaagaaaagcgctttgctcctgtctatgatgaagaagatacggttacggttccttgcgagcgagtgttcttaagcatcggacaaagcatccagtggggagaactgctgaatggctccaaagtagaacttggaagaggaaatgcggcggtagcggatccggtgacctatcagagttccgagccggatatctttgtaggcggcgatgtatacacaggacccaaattcgcgattgacgccattgcggcaggcaaggaaggagccatctccatccacaggtttgtgcagccgcgcagcagccttaccatcggaaggaaccggcgtcagtttatcgaactggataaagagaatatcaagctggatgcttatgacaattcctcgcgccagataccgggaatagatgaaaccattgatcggcgcaagtcattcagggatgcacgcaagacgtttacggaagaacaggtgcggattgagactgcccgatgcctgggctgcggcgcgtctgtcgtggacgagaataaatgtatcggctgcggcgtgtgcacgacaaaatgcgaatttgacgcgatccatctttaccgcgagcatccggagtgcagtaaaatgtaccggtctgaggataagttcaaggcgattctgccatatgcgatgaagcgggggcttaagattaagtttggaaggaagagccagtgatagaaaggatcggtagattatgcacgaactgggaattgtatttcatatcatcaacagcctggaatcggtgggcagggaaaaccagcttacccaagtggcaaatgtaacgctggaaatcggggaagtctcaggcgtagtggattcttatttgaaagactgctggaaatgggcatctgaaaaatcgtctctgctgcggggagccaaactgattacccaggagataccggcggtgacatattgcgaggactgccatcagacctatggaacggtggagcacgggaaagtatgtccgttctgcttggggggaaatacatatctggtggcaggaaacgaatttaatatcaaggaaatagaggcatgctgagaaagagggagggataatcatgctatttcaaatctatggagagaatgccggctggcagctgcttggatggctattggtatttgcgggactgattcttgcgaatgaactggcaagacgtacgaaggtgggagggatattctgctttctgatcgtaccggcagcattgaccgtgtacttcattgccatctatgttggcgcggctaacggtgcggagtgggcgcttaataatcctacctatgtacatatgaacagctggttccactatgcaaaactatacgcggctaccgcgggatgcatcggcttcatgatgctgaagtataagtggaagatcggcaagaccaactggttcaaggtgttcccgtttgtgatcgtggcaatcaatatcctgatcgcagtcgtaagcgactttgagtctggcgtaaggggcgcgatggccctggcagagtatggagaccgctggtggctgtcatccgagaacgtatggctgtatggcggatggtggaactgggtcaacggaatcgccggcatattaaatatcctttgtatgacaggatggtggggaatctattcctccaaagacaaaaaggatatgctgtggccggatatgacctggtgctttatcatagcctatgacctgtggaacttcgagtatacttacaacaaccttccgacccacgcatggtactgcggactggcgcttctgctggctcctacttttgccaatgcgctgtggaataagggcggatggattcagaaccgtgctaacacgctggcattgtggtgcatgttcgcgcaggtattcccgatgttccaggataccagccggttcgccacgattccgatcctgtattccgatggattcatggatgcagccacaagacctgcggcagctgatccgacgatgcagggcgtagtggcattgctggcactggcagcgaatgtgatctgcctggctgtgattatcaagcggtcaaaacagcagaagaagaacccctataagaatgaaatattcacggatcagaaagatttccagattgcaatggaaagagcggaggtataagggatggattttggggacggatcctccgaatgccttcacttaccttcgaaaacccgcttctgccgccccggcttgcgccaatttgctggcaatctgcgaggagtgcgggcggtcgccaactcgccaagattcctttactcgtaatagatctgccggcttccgctgatgcattcgcccagggaataattaatccactcgatggcgcctttggtgtcccggttgcggatataggtccacatgacatagttgctctcgtagagggactggatgccatagaggtcgcagtagcgctcccacatcgtgaagataggagcccggaaggactggaagatcagtggaagcagggtgttctgggatgccagggcgaattcatgctggaattcgaacgcggcctggattgcctcttgattgtctttggcatcccggatctgctcgatgatttccagaagcacctgcacttcctcgtcgctgatacggtcaatacacagttgggcggccagagtgtcaagcgcgattcgcacttcaaagatggagcggatttcttcgttccggatgcggcctccgttgtatttcattatggacatcaaggtgtccaaggttcccttgcgtctgtaatcggctacataggttccgcttcttggctttacgataaggaagcctttcttttccagttcagagatgccgctgttcaccacggcgcggcttacctgcatcatttctgccagctggcgttcgggaggcagtttttcgccaatttttagtttgccggacagaatcatatgttccagctggtctacgaagagttcccgcagagacggagaactgatcttttgaaattccatgaaatcccctcctttgtactggcttgattgtatcatataccattggacggttcaagaaattggaagtatattggcgcaaaccatttatttaagaagcgacagccagaaggcgtaaaaatgtaaggacaatgaaaggttccggaaatgtccacgtaaggatggcgtgatagaattttcctagaaagagataggaggatactatgagacgaagaatgattacgatactattaacatccggatgcatgatgttcctggccacaggctgttccaaggctcagatcataaaacagtatgacaatgtgctgcagtccatcggagagaaaagcattacaaaggaccggaagctgcaaggggagcgaaaacttggggaagatagctatgtggggagctataaggcagattatgagtcttttagcggagaagaaatcgtgttcgggggaacaggactttcgcgggatgcaggaaataaaattaaggtctcctgcaagattgaggcggaaaacggcacggcgaagatcaccttccaatcaggaatggaggatgcaagaatattgtgcgatggcacgggggaacatacggagacgatagaactgccttgcgccagcaactatctgaaaatcgaggggaaagattttaccgggacaatcgaactggacagcgaataggagaaacagaggcatgatctggcagcgggaccaaaaagtaggcgtatcccgaaagccgagattgtggatgtgccattgaagatcaagattgtcggacaagaaggactccgggaatgcgtggagggatgccctggtttttcgggacgctttgtccaagatccgtttcggaggtagcggccatcttttctatgaattcttcataaacattgcagcattgggcctgttctgtgaagtctaccaccgtcaggtctccgtagtccggggtgaataatctggctcataaggtgttcaatagctgtgcgtcgccctttagaatgggaacaggaaattggatgattccgatatgggagtttccttccttatcggcaacatcccttcctaccacatccggcatcttcatgcccattgtaattccaagaatggcggcggtattggcaattatgcccagcgggagcgcctcgtcgataatcattacgcatttttcattttccagattcatagctatatcctcatttccattttaaatttcatgcgataaatttcatgcaccgttctattttacttggcattagaattcatttcttgcaagatatcttcaattttataaattcatctttaaatgcagaaatttggcaggctctgattatacggggcttcctttggcttgcgtgttgactttgcgacatgagtgtcttataataaattacagacacatgtgtcgcaaaaagcgagaaaagaagaggagtttgatatgaacagaaagggaatggagacaaggcagcatataaagactaaggcctgccagctgtttgccaaaaaaggatttaaagaagtgacgatgaaggatatctgcgattcgacaggattaagccgtgggggactatactgccattatgacagtaccgcccggatattcgatgagattctgaatgactttatggataaccaggatgaagagtttcgctctaaaatgctggaagggctgtctgccgtagagattctggacgacgtcctggatcgttacagggaagaaatgatcgacggcgaggcgtccttaagcgtcgcgattttcgagtacttcagcgggagagggaacgcttgcgaggaaaatcctctgtaccagcagtacctgttttcacgaaggatgtgggaagaattgatccagtatggcattgacaggaaggagttttaccaggtagacaagacggcggtatttgatctgatcgtgttttcctatcaaggggtgcggatgtacagccggatcatgaccattacagaggatattccgctgcgcatcacgtcccagatcaggaagatcttagtaaggagggaaggataatggcaactgtatttgaaaattatgatgctgcaaggacagcgtttataaaccctggcgattgcgtaaaggcacaggaaaactttccggaagtctgcatcacgactttttcagagagcattatcgaagattttgccaaaaagaattccgcagaaaaaatcgcggaactatacacggcaaacggagtactgccagtctatggcatcgaatatgcagggataagaatggctttctatctatccagggtaggtgcgccggcctgtgtggcaggactggaagagatgattgccatgggagcgaaaaagatgatcatctttggatgctgcggcgttctggatgaggtggaggtgcaagataagatcatcattcccagcagtaccatccgggatgaaggaaccagctaccattatcttcccgccggggaggagatcgggctggaggattcctgcgccgggatattggaggactgccttgtaaagacgggaatgccttatgttaagggaaagatctggacgacggatggaatttaccgggagactcatggacgcttgaaggagaggagggaacaggggtgtattgcggttgagatggaatgttcggctgtattggcagtgtgcaggttcagaggtgttccggccattcagtttctatatggagcggataacctttctacagataaatgggagcccatggacctgatggaatatggaatcagggaatgcgacagatatatggcccttgcgctggaatgcggggctagattgtagccggagcctcctgatatccaggcaaataaaaaataatcataaaatccaaagagaatctttcagatatgttaagaattactccaaggaaatctttagaattggcgagtaagataaggacaaagatgaagaaagaatggggaaggaacatgaacgtacttatactcagcagtcaattcgggatgggtcatcagatggcagcaaaggcaattggagaagagattcttaagttggataaagatgcaaatgttatagaacttgatttgttaagatattattatccaaaggcaagccgatatattttccggctattccagatgatggtagaacattgctatggaatctataatctggtatataagacaaccggaaaattgaaggtagatctaaagcctatgggcattaatctctacagaaaactggaaaagttgatggaggatcattatccggacatgattgtatgcaccttgccgctgtgtgccaagtcgattgcctcgtatatggaaaagaccgggaagcatattccgctggtcacctgcattacggatatcagcatccatccggagtggatcacgcctcaggcggatgcctatctggcgccaacgaaagaagtcaaggagaatctggtacgcaatggtgcaagtccggagcagatattcgtcacgggaattccggtcaggcagcaattcctgggagaagtgccgatgcgtgataaggggcagaaaaaaatactcattatggggggcgggcttggtattatcccgaatctggatcggctgatgcaggtaatccaccgtatgccgggcatcacggcaaccgtcataactgggaaaaaccgaaaggcttatgaagcgttccaggggagatatgaagacattgaagtacttggatacacggagaatatcagcaaatatatgaaggaagcagaccttgtaataacaaaagcaggaggaatcacgctctttgaactgatccattgccaggtgcctctgttcgtcatccatcctttccttgagcaggaagtgaacaatgcaagatacgcccagaatatggggattgcaaaggtcatatggaataaaagcagtgattttcccggaatattagagaaattcttatccgatggaagacaatgggagcagatggcggagaacataagcaaggcaaaggatgagattatggaatggagcctggatgatgcgatgaatacggtgatggaaaggatggcggcataatgaagaaaatgatattgatgaccgcattagcgggcgcgtttggctacagcatcctcccatcgttcggactcaggcattatcagagtctgcgacgcaggaagaacaatgaaggcaggattctctacctgacctttgatgacgggccaagcgaggcatatacggaggccttgcttgatctgcttgatgaatatgatatcaaggcatccttctttgtagtggcagagtttgcgcagaagaacccgcggatcatcctgagagctaagaaggaaggccaccttattggcattcattctgtgaatcatcagaacgcgctttttcgggggaacagatttgccttttctgacttggcagcatccattatgactttgaagaaattaggatgcgacgcagggtattaccgtccgccgtggggacacctgaatctattcattctgtactgggtaaagaagatgaatctgaaacttgtattttgggatgttatggctcaggactgggcagcggacgctacgccgacatccatccgcgcgaaactgcttcgacgcgtttacccgggagccatcatctgcctgcatgatggaagaggcgccgcgggagcgccaggaaggaccatagaagcattgagagatgcgcttccccaattgctgcgggaaggatatgaatttaaaaggcttgaccaatatgaatgatacgatatcaataaaaaagacaggaaaacagatactggtatttctcttctttctttttttgatttttttctttcttttaaaaggaaaagatgtaagccagatacttaagatcgccgcttgtgcttcctttccggctattgcggcaggaattgccatggctggagcctttaacctctcagaaggcttgaatcttggtattctgctaaaggcaatgggccataaggtgtcttttgcccaagggatgaagtatgcttatacgggattctttttcagttccatcaccccttcgtctacagggggacagcctatgcagctctacgcgatgaaaaaggatggaatagacctgtcccatggctcgctggcgcttttgatggaacttgccagcttccaggctatggcgttcttgtttgaactatttgcggtggccatgattcctgtgctggggataagcctgccagtgacgatcaagatcctgatcattgccggatttatcatgaacgcggcttttgtcgctttcctgctggtggtgattttctcagaacggatggggcagaggatcttgggcctgctgaagaagatcttgccgcgactcccatttgtgaaggaagagaccaagagccaatggattgggaaaatggaagatgggctgcaagaattccatgcctgcgccctgctgatgaaggagcataagagggccatcgcaaagatgtgcgttatcagcgcaggccagattatctgctggtttggcgtgccgtatatggtgtatctggcgctggggtatcaggggagttccttcctccatctctttgtactgcagattctgatctatatgtcctcgtcccttctgcctctgccgggagccatgggtatcagcgaatatgccttccttcaactgttcggaagcatttacagtggcagttccatgacggcggcggttcttttaagccgggggatcagcttttactttctgcttgcattgagcggaatcatgctgcttcttatctacggcgctgcgcggcagcgcaaatgtaaaactatttttccctgatttttctatactttaagcaggccttgcggtataatgggaaaataaggttttaacagagaggttagagacagaatgagcaggaatgataaagatgcgaatgtaaaacaggatacgatggagaaaatgcgtaattcggaggcagtctttgtgattttgtcggattacacgcatatgccatatgtggcttgcgatcctaagacttttgatgaccaggtgttcttgtattttagcgaggaggatgccaaagaagcggtgagaagatttgccgggaaccaggagagcactcgtgctgcaaaacttgagaagaatgggttccttgcattttatacgaatcttttcgcgatgggagtgaactgtatcaagatgaaccagggaacttcccgggaagtggcagtccagctgggggaactggtacgaaggccggaggcggacaaactgccgcaagggcaggtgagaatcgagaatccagaacttcatctgaccgccctgtattatatgcaggaactgcgaaaaagacgggatggaggaaccgatcaattaaaggaattgaatgaggaattaatggcccatttcaaagagggcagatatatcgtcgcggtgcaggagggaaagggaatcccgatgctgcagaaagagggaaaggtataccagccattattcactgacttccaggaattccagaagtttaacaaagagaagaagttcaagacagcagtcgtagaagccggcaagataacagaattcctttcatcacaggcggttggcgtagtcattaatccgatgggcgtaaaccttctgctgaacattgcaagataaggaattggcaatgtaaacaagagtaaagaggaaataacccggacagggcgcggatatgaaaaggccaggcagcgatacgctgcctggcctttgccataatctcatttcgtgtagttcttttaaatatctaaatcaaatcttgctttatatatataaaaggtacaactaaattccgattagtgattttgaaattaaagtcttgttacgttaactgcctgaggtccttttgctccttcagtcacatcgtattctacttcctgtccttcttccagagacttgaaaccatccatattaagtcctgagtagtgtacgaatacgtcgtttccagcctcatcagagatgaaaccgtagcctttttggttgttgaaccattttactgtacctttcattacgatacctccataaaaataaaaataaataattagataccgcattatccataaaactaatctatagataataccccgtcagattagcatatatttataaaaaagtcaatggatttgacaatctttttattgtttttcacaaaaaaacggacataagaattgccctgggccgctttttcagatacaatgaatatcaagaatagttaggaaagaaatgagaggcctatgaaaatatcaacaaagggaatctacgcattggagatcatcactgacctggccatgcatacaggggatggggcgctggaaagcatcggcagcattgccaggagaagagggctttcggtcaagtactccgaacgcctgattaaggaactgaaggagcaaggactggtggtcagcatcagaggcgcccatgggggatactgcctgggaagggatgccggggagataacggtcagggaagtgctgcaggctgaggaaggagaactggctcctgtggagtgcctgacaaaggaaactgattgcggaatcgactgcaatacctgcgccacccgggagatatggagccagatatggcagatcattctcgatacggcacaggaggtgacgatcggggatattattgaaaagtcaaaaaatttgagataagtattgacatatggaaaaaataggtgtataaaataactcatataaaacttattggtttagtaggatatgcaggaggaagtatgaagatatcaacgaaaggaagatatggtcttcgggcattggttgatcttgcagtatattcccagggcgagcccaccgcgcttgctatggtagctgctcgccagaagatttcgctgaactatctggaacaagtattcgggcagcttcggaaggctggactggtgcgaagcatcaaagggcccagcggaggatatctgcttgcaaagccggcgaaagatattacggtgaaggagatactggaagtcttggaagggccattctctatcgtgggagaagatctggacagaagcagcctggatgccatgcagctggcgatcaagagcctggtgtgggatgagattgacgcccggatcaatgagttcatggagaagcgtacgctggaacatctggttaacgagtatagaagttatcaggatagtcaggatatgatgtactatatctgatatttttaaaaagttaaatcctactataccgataggtaatatatgatatgaaaaaaataaagaaagaaggacaacgatatgagccagagaaaagaattgagatttgaaacgttacaactgcatgtagggcaggaacagccggatccggcaacggatgcaagggcggttccaatctatcagactacgtcctatgtattccgcgactgccagcatgctgcggacagattcggacttgcggatgcaggcaatatatatggaaggctgaccaattccacgcaagacgtgttcgagaagagaatggcggctttggaaggcggggcggcagcccttggagttgcctcaggagcggcagccatcacttatacattccagaatctggctcaggcaggagatcatatcgtggccagcaagtacatatatggcgggtcctataatcttctggaacatacgcttccaacccaggggattgccactacattcatagatccggacaaagaaggcgcgtgggaggctgcgatacaggagaataccaaggcattgttcgtggaatccatcggcaatcctggcgctaatctggtggatattgagaaggttgcagagattgcccacaggcatggcatcgtactggtcgtggacagtacgtttgctacgccataccttctgcgcccgcttgcgtacggggcggacatcgtggttcattccgccactaagtttatcggaggacatggcacggcccttggcggagtcattatcgacggcggccgattcgactgggacgcatccgggaagtatccgcagctgactgagccggatcccagctatcatggcgtcatatttaccaaagcggcaggggaggccgcatttgtgaccagaatccgcgcggtgctgttaagggatatgggagcgaccatcgcgccgcttcatgcgtttttgttcctgcaagggatagaaaccttatctcttagggtggagcgtcatgtacaaaatacattaaaagtagtagaatatcttgagaagcatcccaaggtagagcgggtgaaccatccggcgctgccagacagcagatatcatggcctgtatcagaaatattttccaaagggaggcgcatccatctttactttcgagatcaagggcggggaggaagaggccagaagattcatcgatcacttgcagatattctctctgcttgccaatgtggccgatgtgaaatccctggtgatccatcctgctagtaccacccattcccagatgacggaggaagaactaaaagcctcggggatccaaaagaacacagtacgcctttccatcgggacagagcatattgatgatattattgaagatcttgaacaggcatttcaggcagtatagacggtgatagaacgcatatcattgattaaggacgatctattatattaatatggaggagacagacatgggaaaagtataccagaatgtagaagaattaatcggaaagacgcctctaatggaggtgtcgaggattgaagaggtggaaaaactggaagccaggatctacgcgaagctggaactattcaatccggcgggaagcgttaaagacagagtggcgttctccatgatcctggatgcggaggagaaggggctgattagccccggagcaacgatcattgagccaaccagcggcaataccggtatcggcctggcagccatagccgcgtcaagaggatacaaggccattttcaccatgccggagacgatgagcatcgagagaaggaaactcttaaaaggctatggagccgagattgtgctaacggacggcaaggctggcatgacaggagcgataaagaaggcggaagaactggcgggcgagatggacaatgccattgtcctgggacagtttgtgaatgaatccaatcccaaagcacacatcaatactaccgggccggagatctgggaggatacggacgggaaggtagatatattcgtggctggcgtaggaaccggggggacaattacgggaaccggcagatatctcaaggaaaagaatccgctaatccaggtagtggcagtggaaccatccgattctcccgtgctctcgggcggcaagccgggacctcatggcctgcagggaatcggcgcgggattcgtgccggagattctggatacggatatctatgatgagatattaaaggtggagaatgaggaggcctatcaggctgcccgcctgatcgcaaggaagcaggggattctggtagggatctcgtcaggggccgcgcttcacgctgcaatccaactggcgaagaggccgcagaacgcaggaaagaccatcgtcgcgctgcttccggacacgggtgagagatacctttcaaccccgctgtttgactaatcatttctcttgacgaaatgcccgtaagcgtgtaaagtatatagtgctaattaccaataaaagatacgaatcaaacagtagaggatataaggtatgattacactgacggggaaaaaggtgtccgagggcatagccatcgggaaactgtctttttacaagagagatacgaaggagaatcgtcgcatctatgtaaaggatgtggagaaagaggtcatgcgtttccagaaggcccggcagaaggcaatattggaattgaagattctctatgacacagcggcgaaggaagtgggagaagccaatgccgctatctttgagatgcagcaggcaatcctggaagaccgggattttatagatcagattacgaatatcatcgcgactcagaaactgaatgcagaatatgccatccaaagcgtagcgcaaggctttatatcagatgcggtagcgaaggagaaagactatgtgcaaggacacgatgcagacgtgaaagatgtggcaaaccgtgtccttcgcattctgtccagaggatggaaagacaagatgctgacggatgagccttttgtactggcggcgggtgaactgtacccgagcgaggcagtgcagctggataagaccaaggtgctggggtttgccacgcggtatggaacgatcaattcccatacggcggtactggcgcgcacgaaaggaatcccctctgtcattggacttggagaggcgcttaagaaagattatgaaggcaagatgatcatcgttgacggttttgagggcaaggtttatattgagcctgattatactacgattaccaggatgaagcagaagcaggatgagaagcacacccatgtgaagaacctggagcgtctgaaaggaaaggacaatattactcagagcggccagaggattgatgtctgcgccaatattggaagccgggaagatgtagagaatgttatccgctgtgacgcaggcggaatcggactgttcaggagtgaattcctgtacatggagaatggggccaagcctcctacagaggaacagcagttccaggcatacaagctggcggcagaatccatgggctcgaaaaaggtggtcatccgtactgccgaccttggaggagataaagtggcagagtgcctggatctgggcgaggatgccaatccagccatagggtatcgtggaatccgcgtctccctggataaggaagaactattcaagacccagttgcgggcaattctgcgggcatccgcgttcgggaatctgtcgatcatgtttccgatgataacatccattgaagaagtgacacatgccaaggtcatgctggaaagagccaagagagaattaaaggatgaaaagacttcctttgatgaggagattcctgtaggcgttatgatagagactccggcggccgtcatgataagcggagaattagccagagaggttgatttcttcagtattggaaccaatgacctgtcccagcttactctgggaatggacagacagaacggcaagattgataagttctatgatccgcatcatccggcattgcttaagatgattcggattattgccaataatgtacatctggaaggcaagcatatcagcatctgcggagatctggcggcagatttggaactgacggaatattttatccagataggaatcgatgaactgtcggtggctccgaaccaagtactgagccttcgcaagaagatcagggaaattcagtaagttcagataagattatagataataagaataagaatcaccatgatatcacatgataatcatggtggttttttcttattaaggcttgtaaatgagtaggttcgcagagatatgaatatagaggaaaaagtagtgatcgctaagtatgcggcggccctgattgaaaaggatgattttgtctaccggtgcagggtctttctgccgggcggcgagttaaaagaagtgacggaggcgatcgtaggcgctcaggcaatagatagcctgaaaagatataactttacgaaaggctttttcggggctaacggagtacatagggagcgcggcctgacgacgccggatattacagaagcgccggatttgaaaaaggaatgatcctgactaccaggctgcgggatgcgccctacaaggcatgcaagaatattttggaggttggataaaacatgatttacacggtaacatttaacccttccctggattacgtcatccgggcggaagaactggtgcccggcaggcttaacaggaccacccatgaatgcatctacccgggaggaaaggggaacaatgtatcagtgatactgtcaaatctggggctaaagagcaaggcccttgggtttgtagccggatttaccggcgagtcccttgagaagatgctcaatgattatgggtgctacactgattttatcaaattaaaagagggatttacgcggatcaatgtaaaagtcaatgcaaaggaagagacggagatcaatggacaaggcccggtgattaccaatgaggcgattgatctcttgtatgagaagctggatcagttggaggaaggggatgtgctggtgcttgcgggaagcattcccaatacgctgccctcggatatgtatgagcggatcatggcaaggcttgaaggcagggatatccgggtggcggtagatgccacgaaggatctgctgctaaatgtgttaaaataccatcccttcctgataaagcccaacaatcatgaactgggcgagatgtttggaaccaccttaaaaacgcaagaagagatcatcgaatacgcgggaagactaaaggagatgggagccaggaatgtactggtgtcaatggctggagatggagcgattctcctggcggaggacggaagcatccatagcgggaagcctcccaagggcaaggtgctcaattccgtaggggcaggcgattctatggtagcgggatttttaaccggatacctgaataccggagattatgaaaaggcgttcaggctgggagtcgcaaccggaagcgcaacggcatttctttattggctggcagccaaagaggatgtagtgaggctgcttaatgaggatccgaagaaatttggattataggagggaaaaagagatgaaaatcgtagacttgctcaggaaagagagcattaacctgaatggagaggttcattcaaagaaagaaaccattgaccagatggtagatcttatggctgccggaggcaacattacggacgtggatgcatatagagaaggcgtatataaaagagaagaagaaggcaccacggggattggggaaggaatcgcgatcccacacgccaagactgatgccgtcaaggcgccgggactagcggccatggcggtgaaggaaggcgtggactatgattctctggatggagagccggttcatttgatcttcctgattgccgcgccgaatacagaagacaatgtccatctggaagtattgagcaggctttccatgctgctgatggatgacggattccgtgaaaatcttatgagcgccgggacaaaggaggaattcctgggctatatcgacgctgctgaaaaagagaagtttccggaagaatccaaagagcaaaaggaaaacgataaagaggacaaaaaaggctatcggattctggcagtcaccgcgtgcccgaccggtattgcccatacctatatggcggccgaaagcctggagaacaaggcacaagagatgggctacacgatcaaagtggagaccaatggatcaggcggggataaaaatgtgctgacagccgatgagatcgccggatgcgactgcataatcatcgctgcggataaggatgtaaaaatggcgagattcgatggcaagccagtcattattacgaaggtcgccaacggaatcagcaaggcggaagaactgattacggaagccatgagcggcaaggcgccaatctaccacagcaaaggcacggatgaggcaagcgtaagccaggacggggaaggcctgggaagaaagatctacaaaagcctgatgaacggcgtgtcccatatgcttccattcgtgatcggcggcggcatcctgatcgccctgtccttcctggtggacagctccaacgcgggagccgcggactttggatccgggacgccgcttgcgttgttcttccatacggtgggcaatactgcatttggcatgatgttcccaatcctggccggatatatcgcgatggcaatcgcggacaggccagcgctgatgccaggcatcgtgggcggattacttgccaaggcgggaacatccgtatccctgccggaagaccagtgggtatcttccggcttcttcggagcactgattgcaggcttcgttgcaggctgcctgatggtgctgattaagaaactgttagataagctgcccaaatccctggaaggcaccaagccggtactgctgtatcctttccttggaatcctggcaatgggcgcgattatgatattccttgtaaaccctccggtaggagcctttaatacctggctgaatgatatgctggcaggcatgggagaatccagcaagattcttctgggggccgtcttaggcgggatgatgtccattgacttcggaggaccattcaacaaggcggcctatgtgttcgggacggcggccattgcaagcggccagattgacatcatggcagcagttatgatcggaggcatgacgccgccaatcggcattgcgctggcgactaccttctttaaaaaacggttcaccaagagtgagaaacagaccacggttacgaactatatcatgggtctatcctttattacggaaggggccattccttttgcggcatccgatccgctaagaatcattcctccatgcgtagcaggctctgcagtggcaggggcattgtccatggcatttggatgcgggtcaagagcccctcacggcgggatctttgttatcgggatcgtggagaatgcgccgacgtttcttctggcgctggcaatcggggccggggtgaccatggcaggcatcatacttttgaaaaagccgcttcctgtagaaaaacaatagacagcgaaaatataaataattataataaagaagaggagaacgaaacaatgaaagaattccagtacaccattactgacccggagggaatccatgcaagaccagctggcctgctggttaagaaggccaatgaatttacatccaagattatgattggaaagggcggcaaaagcgcggatgccaagagaatctttggagttatgagccttggagccaagaaaggcgacgagatattcatgacggcagaaggcgcggatgaggagactgcggctcaggcactggaaacatttttaaaagagaacctgtaaaaggggatgatgaaaagatgattacactaacaggaaaaagcgtatttggcggagtggcaatcggcaggattgcattttacaaacgaaatgagattacgatcaaaaggactcatgtggatgatatcgaaggggaagtaaagagattcgagacggcgaaggaaaaggcagtggcccagcttcaggaactatataataaggcaatggaggacgtaggcgaatccaatgccatgatattcgagatccatcagatgatgctggaggatctggattatgtagagtctatcgtaaatatcattaccacccagaaagtgaatgccgaatatgccatcggcaccacggcagataactttgcagccatgttccaggctatggatgatgcatatatgcaaggacgggcagctgatgtaaaggatgtgtccgaacggcttcttcaggtgctgtccgataacagcacggatgcaatgaagatggatgagccgtcgatcatcgccgcggatgacctggttccaagcgaaacggtacagctggataaggagaaggcgctgtccttcatcaccatgtatggatctgccaattcacataccgctattcttgcaaggacgatgaacataccggcagtgatttctcttggagaagacctgaaaaaggagtatgacgggaaacttgccattgttgacggactggaaggaaaggtctacatcgagccggatgcaaagaccatggaggccatgcaggaaaagcagaggaaggaccaggagcagaaggaacttctagagcagttaaaaggcaaggagaacataacaaagagcggacagaaggtaaatctgtatgctaatatcgggaacctggccgatgtaggcgctgttctcaaaaatgacgctggcggcatcgggctgttccgaagcgagttcctttatctggaaagcgagacgtatccgacggaagaacagcaattttccgtatataagacggtggcggagaatatggccggcagaaaggtcattatccgcaccctggatatcggcgctgacaagcaggtggattactttggcctttgcaaggaagagaatccggccatgggataccgggcaatccgtatctgccttacaaagccggagatattcaagacccagcttcgggcattgtaccgggcatccgcattcgggcagatcgcgatcatgtttcccatgatcatctcggtcaatgaagtgcgaagaatcaaggatatcattgaagaggtgaagaaggaactgacagaagaaggaattgccttccgggagaatgtagaactgggcatcatgatcgagacgccggcggcagttatggtaagccgggaattggcaaaagaggttgatttcttcagtgtcggaaccaacgacctgacgcagtatacgctggcgatcgaccgccagaaccagaaattggacgcattctacgactcccatcaccccgcagtcctggaaatgatccgcatggcagcggcgaatgcccatgcagaaggaaaatggattggcatctgcggagaactggcagcggacttaagccttacggagacattccttgagatgaaaattgacgagctttccgtggcgcctggcatggtgctgccgcttagaaaacggatcagggaagcctggtaatagttattgataacaataattaatagatagacccatttactttatgggtctattttgttaatattaacttgttattgtttctaatggtgagagacgaaaaggagggaaacacatgttagaaaagttttttaaactgagtgagaatggcacggatgtaaagactgagatcctggccggaatcacgacatttatgacaatggcctatatccttgctgttaatcccagcatcctttccgctacaggaatggatcagggagccgtattcactgctacggcgctggcatctttgattggcacattgctgatggcattattcgcgaattatccgtttgcactggctccgggcatgggactgaatgcttactttgcatacacggttgtcctgggtatgggatacagctgggaggttgcgcttaccgccgtattcgtggaaggtattatttttatcatcctttcgcttaccaacgtgcgtgaggcaatcttcaatgcaattccgaagaacttaaaggctgctgtcagcgtaggtattggtctgtttatcgcatttatcggcctgcagaacgcaaagatcgttatcggaggctccacgcttctccagttgttctccgtggacaagtacaatgaggcgaatggagtgacagcatcctttaatgatgtaggaatcacggtacttcttgcgattatcggcattatcattaccggaatccttgtaatcaagaacatcaaaggcaatatcctgtggggcatcctgattacatggctgcttggaatcatctgccagattgccggcttatacgttccaaatccggaacttggattctacgggctgcttcctgatttcagcagcgggctgtcagtgccaagccttgcgccgatattctgcaagcttgattttacgggaatcttctcattgaactttgttgttgtaatctttgcattcctgtttgttgatatgtttgataccatcggaacgttgatcggcgtatcatccaaggcaaatatgctggatgaaaacggcaagctgccacgcatcaaaggcgcgcttcttgcagatgcggttggaacgacggcaggcgcactgcttggtacttctactaccacgacattcgtagagagtgcatccggcgtatcagaaggcggaagaacaggccttacggcagtgactacggcgatcctgtttgggcttgccctgttcctgtcgccaatcttccttgcgattccttctttcgcgacagcgccggctctggtagtcgttggattctatatgctgactaacgttgtcaacatcgactttggcgatatcgcagaagcgcttccgtgctatatctgtattctggcaatgccattcttctacagcatttcagaaggtatctccatgggagtcatctcttatgtagccttgaatcttttgacaggaaagacgaaggagaagaagatcagcatactgatgtatgtactagcagtattatttatattgaaatatatattcctgtaaaatataatgggaataggagatttgaacgacaagggaccggaatttccggtcctttttttaaaggaggtaagagaatggacataccggtggtgaagcagatcgcaaaggcagaagaagtgggatgggtgaatccaaaatggatgccatggaatgaggcaaaggatagccttggcatttcgatggaggatattgatgacgcagaggcgaggcttttacgctttgctccctttataatgaagtgcttcccagagacgaaggagcgaaatgggctgatcgaatccgccctgacaccgataccgaagatgcaggaatttctgaaccagacgtatggagatacgatccagggacgtctcctcttgaagcaggacagccacctggcagtggctggttctgtgaaggcaaggggagggatctacgaagtgctgaagcatacggaagacctggctttggaagcagggcttataacgcttgaagataactattccaaactggcagcggatgaatccagggaattcttcagccagtataccatacaagtaggctctaccggcaacctgggcctgagcattggcattgccagcgcggcggtggggtatgaagtcatcgtgcatatgtctgcggatgcaaagcaatggaagaaggatatgctgcgtagccatggagtaaaagtggtggaatatgagtcggattacagcgaggcagtaaagaatggcagaaaagaatcagacgccaatccgaatagttactttgtggatgatgagaattccaagaatctattcatgggatatgcagtagccgcaaagcgcctgatcggacagatagaagaactgggcatccaggtggatgaagagcatccgctctttgtctatattccctgcggcgtaggcggggctccgggcggcgtgacgtttggcctgaaggagatatggggggatcatgtgcatgtgttctttgtagagcccacccaggctccttgcatgatccttggcatggcgaccggacttcacaatcaggtttgcgtccaggatatagggcttaccggactcacccatgcagacggcctggcggtggggcgtccgtcgggatttgtaggaaaggttatggagcctctgctaagcggcgaatttacgctgaaggatcaatggctctatgagtatatgagggctttatgggatacggagaatatcttcatcgagccaagttcctgcgcggcatttgagggaccgctgaaacttacgcgttatgctgagacgcggaagtatattaaggaacatggcctggaagacaagatggagcagtctgcccatatcgtgtgggcgaccggaggaaaactggttccggaaaatatccgtgaagagtataagaatacatatctggactaggacagaaggcaggaggagaaaaaatggaattcagtcattttgatgaggatggcaatgcggtaatggtagatgtctccggtaaagaaatcacgcaaaggagagccctggcagagggaaagatccgggtaagccgggaagtgtttgaagccatcgccggcaggaaggtgaagaagggcgacgtgctgacggtagcccaagtggcagggattatgggaacgaagaggacggcggaactgattcctatgtgccatctgctgaatcttgccaattcggaagtcaggttcgagatgaaccctgaaaaacttgagatcaaagccttctgccaggttaagacggaaggaaagacaggggtggagatggaggcgctgactggcgtgtcgacggcgcttctgaccatatatgacatgtgcaaggccattgataagcggatggtgatcgaagagatccatctctgtgaaaaaagcggcggcaaaagcggaacttttatgtttgaaaggtagaggagaaccggatatggcggcagatagggtagaaaaactatttaagaagcagttgaccgcatgcaggggatggatgccatccgcatggtaaggatgcaaggacttatgaaggatttccgaaggcttatggacaggtgctccgattcgtggagaacaatggttatgagatatatggaaatccgagggaatcgtatatcaacggcgtatggaacaaggaatcggaagaagaatggctgtcggggattcagtttccggtaaagagaacaagtatgaaaccactgtaaaaaaataaagattaacagtgtatcgaattgacaaatgcggggaaatcatgcaatatagatttgagaaagtacccttccgggagattggagtatgcgacatgcttttaataaaaaatgccgaagtctatgcgccggccagtattggaaaaaaagatattcttatatgtaatgaaaagatagaactgatagaagacaaaatagaaggactgcctggaaactgccgggtgatggatggagaagggcttctcctcgccccggggatgatcgaccagcatatacatgtgaccggaggagggggggaaggaagcttccatacccgcaccccggaacttgccctgtctgagatgataaagggagggattaccacggcagtcggccttctcggtaccgatggcataacgagaagcgtggagaacctgtatgcaaagactgcagcgctgaatgaggaaggggttaccgcatatatgcttaccggcgcctacggatatccggggccatccataacgggtgagcctgacagagatatcatgtttgtcaaagaggtgcttggaatgaagcttgcgctgtctgaccaccgggcgccgaatgtgacgccaggacagctgatgcagatttcgggccgggtcagagtggccggtatgctgagtgggaaaccgggagtggtcgtactgcatatgggtgatgcaccggaagggctggaaccggtctatgaagcccttgaaaatagcgcgcttcctatccgtatcttccgtccgactcatgtgaaccgcaataaggcgcttcttgaagccggatacgggttccttgaaaaaggcggctatgtagattatacatgcggtatgaagggacagccttcaccgggacaatgtattgcggaggcggcgagaagagggcttccgcttgcacatattacaatcagttcggacggtcatggcagttggtcaaactacgatgaggacgggacccttctggatattggcgtatccggggtagacagcctctacagggaactgcagcttatggttaaggacctgggaatggatctcgaagatgcccttggatatgtgacctcccatgtggctgaagcgctcgacctgtacccggagaaaggctgcataaaagaaggggcggatgcggatatgctgcttttcacagaacaactggatcttcacacggtgatagcgcgaggcacggtcatgatggaaggcggggttttgaaaaggaagggcacatatgaaagttagaatttcgcaagacatggagaaagaacacagtcagggtatgcaaaaaagcatcaccataagaagggtcaccacaatgaatcattttggaaatgttttcgtaattatttacaataaagaaacacaaagaaaaaccccacccctcatgattgacaatgtcatgattgaggggcaggggagttgagagtgtgctcagcacactttttattatcataaaggcggacagtttttgcgtcaccggctttccatgtatgcctgaaatacatcggccacgcgctgcatatcgtctcttgtaaaacgctggtcgcagctgatggacatgatatggtcatagatgtagtgtgcgccaggatactttccgatgtctatgaaaggcggtaccggccagtatactttcggcggtatgccggcggcagccagatgcttcatgagagattccctgtcttcgcagaggaaggggaagaacattgggcaggtgtcctgcaaaagattagtatatacagggcataccgatggattgccaggtaggtgctccagcagatatgcataattgtcccggcgctttttaacggcatctgcgagcgggtaatggaggatggtctgaagggattcgccgtcgccttcctgcatatcgaagatctcccgcagcatccattctgcctcccagaatgcatcggtgctctttttgttccatgcctcgtctccggttctctcgtacgcttctcttgcccggagcgccctgtcccttatcttgagatgttttttgtccgcggggacaggtgatacgccaaagcgtccgtttcgtttgaatgccagccctcctgaggtgacccccatccattttcggaggctgaccgcgatatagtcggtgtccggacaggcaccggacggtgagaatgctgtgtgggtcgtgtcctgcatgaccgtcacgccgcggcttctgcatgttctgacaaaatccgtgtcataagtagaaaagccgtaatatccgcagatgagcagaagactgatcttgtcaatgagtctgtcatcaaactgcggtacaaggcagcggtctacgtcgtagtagtagatcttatagcctgcttttacaaaacagccacttaccgtctcgcacgtatatgccgggagataggcagtacgtttcgtatctgtgagcatggaatcctgcaggcagagatagatggcgcaacggccggacatgaggtggcttatgtcaccagcgtccgggcagacgaggtctaagtaaccgtttgtttcagaactgttcttttcgtaggggaagaaccctcctatttccatatgtagatacctcctgatataaatatgctgatactggtctgtggtctggagctggctgcgtcggctcaggatgacagggtctttttgaaatcttttcgttccgactccggaaccatgtcgatgacgaggcaggacgcgagaagatttaatattgtcataggcagcgtcaatgagttgtagaacatcttcgtcgaagtctgacagagaagcaggtgggtgctgtgttcggcggccggcgatgagatgctgtcagtgatggtcaggatagggacgcctgtgtccgccgccttcctggcaatgctccccattggataataatacttggggaaggaaaagaagatgacaaggtcaccctcgcaaagctgctgcaggcggttctgcgtctcagccaggtcggccagatcgatgagggtcgcgttgaaatacagcagccggagccttgcttccagaaaatctccgagtattttggagatatcatgggcaaaaatgaaaatccgtctgcttttcttaatctttcccgcggcggccacgatggattccggattgaatgaagctgagaaatcagcgaccgcggcggcctcctggcggcagatgtctgtaagcagcgcctcctttgccgagcgttcgcaagacgcattttcaggcggaaaataagcgggcgcagagagcaggcgtatcatatgctgcgtgtattccctgaattcattcttaagttccaggaagctggaacagcctattttttcgcagaagcgcagcaatgtcagttcggaagaggctgtctgctggctcagctgggccagagtgatgtagcagacgtcctctggattttccatcagataatctgcgattcccttctgcttctttgtcaatgcgggatacatgtcccggattctctgtaatatgtccatgttgtttcctttccatatatggtacccatgtcaaatataggcggcagtgatgcgtcataaactgcctataaaataaatataaagaatccataaacaatttgcaagtaaatactttacaattttgctgttatatgtataataataattaaaaaataaagtaaatactttatattttgagaattccggatatctcactataaataaagtaggacaactttgcagaaggaagtacaaaagggaggagagaagtagcaatgaaaaaactatttgaaaaacactttgagcgtacatggcttgtaatctttctgatcatgttcgtcatcatcatgattccgtttccatttttttacagcgaaacttatattccggcgataggagggatcccctcatatatcttcggatggttcgtacatacggcgatcacgtttgccctgattatcgtctactacagaatgtgtatgaaacgaaaagaataccacgtgtatgatgagaaaaacgaggaagttactgaaggaggagagaaataatgtctgaagcaatccaaccatcaccggcaccgttttacacggtcctggctatatatcttggtattatggcatttatcggctggtatgccagccgaaagacgaaaaatattggcgatttcttcgttctcagcgggaaagcgggtgtaatcgtaagcggtatcgcttatttttctacgcagttttccatgggtactttccttggcactccgggtacgatatttggcgtcggttatgcgggcatggcaatctctgtgcctggcgctgtcttctgtatgatactgccggcccttctgataggaaggaaacttgtgacacttgggcatgaatacggtttccttacgatggcagactatctgaccgaccgatatcattccaggtccatgagcggcgtgctcggtgtcatgatgctgtttttccttatccctatgatgggagcacagataatcggcgcaggggttatcgtgcatgtatttaccggcctgcctgaatgggtaggggttgtaggaatgggagtaatcgttatactatattgtatgagcggcggaatgaagggcgcgatgatgaccgacgtcatccagggatcccttatgataggtacggccgttgttacctttatcgtctcggttgtaatgggaggcggctttgacaatatcaacagcacgcttcagaatatgaatgaatcatacctgaccttccccggggcgaacgggtacatgccgtgggcttactacgtgtccaacatcgtgctttggtccttcttcacgatggggcagccccacctgtttacgaagttctttacgatgaaggaccataagacgatgttcaaggccatactgctcggcacaggagggatgttcgtctctgccacgctgattgaatgggcaggcgtcaatggaatcgcttccatccagaatattgagaaggcggatcagattgttcctatgattctgcagagagggctgaacccattcctggcgtccctgttcatagccggaattgtggcagccggaatgtctaccattgacggcatcctcgtcactacgacgggggctgtgacacgggatatctatcagaagatagtgaacaagaaggcgaccgatgagagcatcatgaaactgtccaaagttgtcaccgtattgatcggtctggtcgttatactctttggcgtattccagcctggtagcatctttgagatcaacctgttcgccttttccggaatggcggtcttcgtcgtgccgatcctgtttggcatgtactggaaggaatcgacggccccgggcgctatagcggctgtggcggtaggggtaattgcccttcttagctttacgcttgttccggaagtgaaggaactggcccttgggttccatgcactgttcccggctacgatactcggcgcggtcacgatggtaattgtcagcaagttgacacaggctccgccgcaggagacgattgaccgtcactttaaactgtttcagaaaggttagtgccacataaaagaggaggtagttagatgtatcttggtaagatgacaacagcccaggcaaaagaggcatttcagaaagatccggtgctggtgataccggtgggcagcacagaacagcatggcgcccagtgtgcgctcgggacggactatatggtaccgtcgtatctggcagaccatgtggctgacatggaagatgtgattatcgctcccacggttccgtatggcgtctgtccttatcacctgagttttgaaggtagtatcaatatcggatatgaggggctgtatatggttctgcacggaatcatggactcgcttatgcagcatggggtgagaaggtttgtcgtactgaacggacacgggggcaatacgccttccatcgaccgcgcggcgcttgaagtctatcataagggcggtatctgcgccagcatagactggtggagcctggtagcagagttggatgagaagttccggggcggacacggcgacatcttggagacgtccgctatgatggcggtcgacccggatgcggtgcatctggaacttggtcagcctatgaatccgcagcatccttccaaaaatgtagaggcagcctatatacaggcagtccgctataagggcggcacggtccgccttgtgagagatacgaaagagatagccccaagcgggtggttcggtccttttgacccgaaggactcgacggctgaactcgggcaggaggcgctcgatatgtctgtaacgtttatccggggattcctggaggaaataaaagggtttgcatagttgtatgtcttattctctgatgggaagcgtgtaccagatggtgaaagactccctgccgttccctatggtagaggagtggattgctagaaacattcccctagagccggatcagcatggttaccgtgaaggtgtcctccgtataggagatatccagcgtgccattatatctgtctatgatttcacgtatatttcggatgccgagtccatgggacttggcatcttttttgtccgacaggatatggccgtttttctccacgatggggtttgccttttggttcgagatctcataactgaagtagccggaatccgtggaacgggcctttacggagatctttcttgcgccaggatctctgactttcagggacgcctctatggcattgtccagagtattagagaacaaggaacagaggctgacagagtcgatgctctgtatattatggagatctacatggaagaagcagtcaatgccttgcccggctgcctggctgtatttagcgttgagaacggcattgacgatgctgttcttgcagaatacccggttttgcacggcaatctgggactctacttctttaaaatattcctcggcttccattctgttttcggaataaaaaagatcctttatcacacttaagtgatgattcatgtcatggcgtaacttacggatctccgtctgattgcgttccagttcttcataatattcctgctgcagcttcaggttattccgctctgcctcaaggcggatgctgttggaaaaatatccggccaggcagaggctgcctatgttggtaatgatgcaggccagggcgcatagccagatcttgtagctttccgccggcgcatagtagatgacggtagtgatgctgaccagcgaagccaggcagaccgcgcccagcaagatccaggtgttctggtcgaagagcctgctgatatcaaaaagtctctggcggaaaagcctatacagcacataccagaagaggatgtgcaggaatgcatctgacagatgacagaatatgcttgcaaaaagtgtggcatctaaagaaaaatatactactcccaacagatcctggatgagaaaatttaatgagatgatcagcgggtaaaagattgccaccgacgcaagcttgggtacgactcttcctttgaacgctaccagcatcagcgcggtaaaccacagaagatccaaggtcacattgaacatatcgttggtaaagatggtcattccaaagagaaagtagcaggatacgcctatgacggcggtccagaactttccgtccttccttggaactacggagtaaagcagtctgcagaaaaaaggaagcccaaaggcgtacaggcatttggaaaagacttccattattgtggacactgactcttgatttcccatttttatcctcccttattggagcagcgcccgggcaaaggcgatctccagctgctgtctgtaagtcctgctgacaggcaggaaatgatccccgcacacgcatccgtcaggttccagggctgtaatgtggttgaggtttgccagatatcggttatgaatccggatgaaatagtccggcagctgcttttctacctctccaagcttaccataaaagtccagcttcccatctgctgttaagatggagaccttcctacggtcgctgcaaaaggccaggatatgtttcaatgggactctcaagatgccggatttctgctcaaccgtatagtactgctcgcccagattgccaagcagttttaaagcctgttccaacacctccaggattttccggtcttcgtagggcttcaggatatagtggaatgcatggacgtcataaccctggaatacaaagtcagggtaagcagtcacgaagatcaggatggtgtcggactccatccgccttaaggagcgcgcagtctccatgccatttagtccatccatctcaatatccagaaagaggatatccagtccatccgtctgggatcctgcaagcaatgcctcgccggaagcatattcctggatgcggtattcttcccccagtagctgaagcttcctttcaagcgggactctcagagccttttgcatctttggctcgtcatcgcatattccgatcgtgatcatatttccaccgtctccttatcatgcctctgccgtcaggcataaggcttctaaacgttattatacagaaatatccgggttttgcaaactttacagaaaccatgtcaaacttgacatcttgaatgaagatatccttgctctcttcttctagaatagaagacagaaagaagaagggagcaatcattatgttaaaagtagagcatttagcaaaaagttatcagaccggaagccaggtatatccggtccttaaggatatatcgctggaagtggaaaaaggagagttcgtggctgtcatggggccttccggcagcgggaagactacgcttttaaactgcatttcctgctttattccttacgaagacgggagcatcctgctggcaggaaaggatctgtcggggcttaaggaggaagggcttgccaaggtccgtaatcagagtatggggtttgtgttccaggactttatgcttctggacggcttgagcgtattcgagaatatttgcctgccccagatcattgcgaagcggccgattcctcagatggaggcaaaggccaggcatatctgccgcctgttcggcatcgagaagattatggagaagtacccggcggatatctccggcggggagaagcagaggacggcagtcgcaagagccctgatgaaccagccctacgtgattctggccgatgagcctaccggcaatctggacagcaagtcctgcaaggcggtcatcgatgcgtttctccaggccagatcagagatggacgccaccatattcatggtgacccatgacagttatgcggcatccttctgtgaccgtgtgatcgtgcttaaggacggcaaggttcatggagaactgaaaagaactggtaccagaagagcgttcatggatgagttgctggacaccatcagagaactgggaggggattcgcatgacgatgagtaagattctagagaaattgcgaaaggagaataaggaccagtacaggattcttggcatctgcatcttcctgtccatccttctggtgtcttcttacgctatgatgtatttttcgcccactatccaaaagatgctgccggagggaggcgatacgagaaaattatgctggctgatgttcggcgtgacggtagcaggctgtaccatattcacgatatacggagcgagtttgttttttaaatacaaaagcagggaattcggagtgcttctggcgctgggagagcggaagaggcagctggccggctgcctggcaagagaactcgccgctgtgatcctgggctatacactgctgggcgttatcggcgccttcccaatatccttccttatctggaagggattccaggccttgctccttgatgcccgtaatcttaggtacagtatcagtatgatgggaatcgcggcgggcgttctttttgcctgtctgcttgcttgctgcatatttgccgccggataccgttttatcaggcgggcagatattatggaaattctgaaaacccagagaaaaagcgagatcgtaaaagatatcaggccatggacaggaaaactaggcatggcctgcgtaataataggcctggcgcttgcgatggccgtgccgccgatatgggccagagtgttccatcatcaggcctccccgctttggaatggagcctatctgatcagcgccgcaggcctgtatctattcctccttggcgcggtaggccgggcaaagaagggacgctatccagaaaaatattataaaaatattatttccactaatctaatgcgattcacggcgaggcagacgacaaagaatatgtgcgtgatcgcgatgctgatcttcgtacttctgatctctgccttctggggaatgtcgtactatgattctgcattccgaaacggtgaaaatgctccggtcgattattccctgcattatccggcagcagaacagcagattacgaaagaagagatctatgatctggcagccaggcatggggtagaaatcacagattataaggaagcacaggcagcagaacttctgatcacctatgccggcaccgaattaagcgatgacggggaatactatgatgtgaagcgggaaaagtatgccacattcctttctgcctctgtattttccagaatcgcgggaaaacaggtgtctttgaagccaggagagtataaagccattgttcagcagagatatcaggaagagatatgggctaagccggaatgcctgctgaaggtggcaagcccggctgccggggaagagatgaagccggcttataaaggaacggtagggttcgataatctgacacgcgtaagcgatccatttgcatttatcctgtctgatgcggattatgcatcgtataccgctgcccttacagaggataacaaagtggatatggttttctttaacgtgaaggatgtgatggatacctatccattcgccaaagaactggaagaagaatacatcgcgcatgccacagatatctcggaccattatttcctttatgatgcccgtgaagaagaacttgcggaaaaagcaggggaaccctacgcatattcaggcagggtagggatgacggcagataatccggaactccttcaggactggaaatatgcgcctgtcttcaaagttcttacaaaaggggaggttatgcagatgatcgcggtattcgtgctgcttagcgcctatattgcgataattgccctggcggcaatcggggtcatgacttatgtaagaagcattaccattgctgtcgataacaggcagctgttcgaggatatgaagaagctgggggccagccgggattatgagacgcgggtggtaaaagtacagcttcgcaagatcttcttatatcccggcatcggaggatgcgggatatccctggtatttacgatcctgatgctcttttttaacgatatgcgcctggaaatggaagaagtcaggctgatcggaatcgagagcattatgattggggcatctgccatcttcctgtacgtactgtaccggatctcttttcggaagatgagaagcatgctggatctataaggaaacaaaaagtgatagtgattgtaaactttttgtccatggactgcttatattttgcaattaaaaaagaactctacaagttgtaagatgccgtgtgattttccgatgtcgcgtcctatgaaatgttaaagttatatcaatcgatactttggcagatatgataagccaaaggaaaagaaaggaaggaaaagttcatgaaacttgtacaggacaaaattacaattatcacaggcggaacccgtggaatcggattcgcagcagcaaaaatctttattgagaatggagcaaaagtctccatatttggcgagacccaggaagaggtagacacagcgctggctcagttaaaggaactctatccggaggaagaagtattgggattcgctccagaccttacatccagagatgctgttatggcagcagttggaacggttgcacagaaatacggaagactggatgtcatgatcaataacgctggcattacgatgaacaccgtattctccagagtttcggaagaagattttaaacatataatggacatcaatgttatcggcgttttcaatggcgcatggtctgcttaccagtgcatgaaagaggcaaagcagggcgtcatcatcaatacggcttctgttaccggaatctatggatccttatcaggaatcggctatcctaccagcaaggcaggcgtgatcggcctgactcatggtcttggaagagagattatccgtaagaacatccgtgtggttggtgtagcgcctggcgttgtagatacagacatgacgaaggggctgccgccggagattctggatgactacttgaagtcattcccaatgaagagaatgcttaagccggaagagatcgcaaatgtatatctgttccttgcatctgacctggctaacggcatcacagctacgacgattagcgttgatggggcttacaggccatagacgaagacaaactgctattaattccatagttcatactccaagaacaggcaggcaagaggaatccgcgttttagcgcggattccccgggcctgcctgatttaattcagctggtatatcatgaagttcagatacgcggcgaacaggcaccatataaggtagggaatctgtagatatgcggcaacaggacttatcttgtgaaactgatatatcatcagaactatgaggatgataagtacgagaagccataaaaatgcaaagaagtacatggaaaagccgaaaaagaatatgctccagaagaagttgaagaacaactggataaaatatagtcgaagcgccttattcttttcaggatcttcggattcatagattatataggaagatattcccatcaatatatataatatggtccagacgatgggaaatataaagggcggaggactaagaggcggcttattcaatgtagaatatgccgccgaattgccgcttaagacagcagacaaggatcctaccgcaagaggaataagaataaaaataatgagagcgcttttgtttttgatattcatatatacaggctccaggaacgactttaaatattatatgaaaaatctccggaaaatatgagcgtcatgctgttctccatatagattacggaacacctggtattcaatgtacgtccggccatgggaatatagcgcagtccatccatggacatctccttcatgcaggcggggacaatgccaaagccaatatcacatatctgacattcataggagatgatgtcatttgatattgccgtattcggcgcaggcagacttgcggcggcagacagaccaacggccagggcggacttcggaaagccatccagatccctgaatatgtaacgccttatgtccgctttgccttgtgatttcgttctttattctgtataatagggaaagaaattgcgaagaggagcagatgataaagatgaatttgctgacaatggaacatataacgaagtcttatacgaaccgggtgctgctggacgatgaaggatttagcattaatgagaatgaaaagatcggcgtaatcggaattaacggaatgggaaagtccacgctgcttaaggtggcagccgggatcgagccatgcgattcgggaaagatcagcatgggcgggcaagtgaagatctgctatctgccccagacgcctgtctttcaggaaggaaccacgatactgaaagctgcggtggagggcaatgtggatgaattgaaccgctggaccatagaggcggatgccaaggccatgctgaaccggctggaattcacagattatgaagagcgtatcgaccacatgtccggcgggcagaagaagcgggtggctctggtcaatgcgcttcttacgcctgcggacatcctggtattggacgagccgaccaaccacctggacaatgcgatgtccgagtggctggaagagtatctgatcagtttccggggagccatcctgatggtgactcatgaccgctatttcctggatcgggtggctaccagaatcgttgaggtggatcagggtaagatatacagttatccgggtaactattctcagttcgtacgcctgaaagaggagcgccaaagtatggcgctggcaacagagcgcaagcggaagagcatcctgaagacggaactggagtggctaagccgtggggcccgggcaagaagcacgaagcaaaaggctcatatagaccgcatcaaggctatgcaggagatccgggatatccaggaggaaaagcgggtttccatggattccgtggcatccaggatgggcaataagacgattgaacttgcgggaatatccaaatcttatgatggcagaaaagtgatagaggactataactacatctttctgaaaaacgaccgtatcggcatcatcgggccaaatgggtgcggaaaatccacactccttcggattatctacggaattgtaaagccggacgcaggaagtctggatatagggcagacgatccgtatgggatatttctcccaggaaaatgaatacatggatgattccatgcgggtcatcgactatgtaaaagaagtgggagagtataacacaacttccgacggcaagatcactgcctctcagatgctggagaacttcctgtttgacggggcgcttcagtggtcgaagatcgagaaactctccggcggggaaaagcgcaggctatatctgctgcggattctgatgggcgcgcccaatgtactgatcttagatgagccaaccaacgatctggacatccagacgctgaccatactggaagattatctggaccggtttgacggcatcatcatcatcgtatcccatgaccgctatttcctggaccgtacggtgaaccgtatcttttcttttgaaggagacggcgtgatccgccagttcgaaggcggctactccgactatctgatccgcaaggaattagaagcgcttccggaggaaacggctgtttccggcgaaataaaggaatgcaatacgaagaacgcatggaaaaagcgtgagaagaagttgaagttcagttttaaagagcagcgggaatttgagaccatagacgatgagattgctgccctggaagataagatagaggaacttaatagccaggtggcggcaaatgcgaccaattctgccaggctgaatgaactgctgggggagaaggaagagatggagcagaaactggaagaaaagatggagagatgggtatatctgaatgacttaaatgaacagatccagaagtcccaatccggcatgtaaaatccattgacggttttttaatcctatgatacgatagatttataaaaaatgaaataactggaaacttatataggttcataatcggttgaacgtttctaccaactaccggaatagttgtctataagcatccgcatgagaagtctgcggataacttgcggactttgggaaaggagggcattgccgatgaatgaacctatttttattttacgaggggatatctgctatagcaggaatctgacggaactggcagtcataaagcaaggctatgtgatctgcaaggaagggatgtctctgggcgtataccaggaactgccagaggaatatcaggatcttcctgtcagggactgtggggatgatctgattcttccggggctatgtgatctgcatgtccatgcgccccagtataccttccggggactgggaatggatctggaacttctggactggctgaatgagtatgcatttccggaggaaggcaagtaccggaatctggaatacgccagaaaggcatatggaagttttgtacagaacttgaaggaaagtgcgacgacaagggcctgtatattcggaactatccatgtgcccgcaacggaacttttaatggatatactggaggcgtcaggcctgcataccatagtaggaaaagtgaatatggaccgcaattgtccggcttatctggcggaaaagagcgcggatatatccgcggaagataccgtagaatggattaaggactgtaagaagcgctgccagattacccggcctatcctgacgccgcggtttattcccagctgcagcgacgctttgatggagaatctcaagaaggtgcagatgcattatggccttccggtacagtcccatctgtcggagaatcaaagcgaggttgcgtgggtgcaggaactgtgtccccagtcagaattctatggggatgcctatgaccggttcgggctgtttggggcagactgcagcacggtgatggcccactgcgtatactcggacgaaagggagcgcaggcgcatgaaggaaaatggcgtctatgtggcccattgcccggagtctaatatgaatctgtcttccggcatcgcgccggtacgggcatttcttaacgagggaattcctgtcgggcttggaagcgatgtggcaggaggaacgagcgaagacatttttgccgccatggcacatgccatccaggcgtcgaaactcaggtggaggctggtggatgatacgttaaagccgctgacggctatagaagcattctatcttggaaccaagggcggcggctccttctttggcaaggtgggaagcctggaagaaggatatgaattcgatgcgctcattgttgatgacagcgccatctccagccgggatatggaggtgaaagagcggctggagcgcctgatctatcttagcgggggcgcgaagattaagggaaaatatgtagcaggaaaagagatattctggaggtgataggatggaggaacgcagagaagttattggcgccagcgtaaggaggatcgacgcctttgacaaggttacaggctatgcaaagtatacggacgacctctgcgacaaaggcgcatatatcgcgaagatattgcattctacggtcgcaaacgggagggtgacatcaatagatgcggacgaggccagaaagataccgggcgtgatcaaggtggttacttgctttgacgtgccgaagaattattttcctaccgcaggccacccctggtctacgcaggaaagccatcaggacgtggcggaccgcctgatactgacggaccgtgtccggttctacggtgacgatgtggccgcggttattgcagaagacgaagtggccgccagccaggctcttcgggccattcaggtacagtatgaggagtaccccttcgtgctggatgtaaaggaggccatggaagaaggcgcgcccaggcttcatgaggaatatccggggaatgtactgaagcataccagcatccgaaacggaaactacgaggaagccattaaggagccgggcctgatcaaagtggagggatggtacgatacgccttccgtgcagcactgccatatcgagaactttatctgctacgcctatcaggccaatcataagatgaatgtggttagttccacccagatcccgcatattgtaaggagggtcgtaggccaggcgctgggaatcccctggggcaaggtaagagtcatcaagccatacatagggggaggattcggcaataagcaggatgtgctctatgagccgctgtgcgcctatctaagccaggtgacaggcgggcatctggtgaaactggatgtaagcagggaagagacctttgcctgtaaccgagtaaggcatgccatccgaagccatattatatcctatgtcaggccggacgggacattcgcggccaggaagctggaggcgttctccaatcagggggcctacgcgtcccatggtcacagcatagtggcaaagggaatgggcgcgttcccgcagttgtatccctgcccgaatgtggaggcagactcctatacggtatttaccaaccgcccggtggcaggcgccatgagaggatatgggattccccaggctatgtttgccgtggagagtcatacggacgacgtggcaaaggcgattggcatgtccccgctggaattcaggaggaagaacctgatgccgaaaggattcgtggatggattctccaagaatgagaattatgaagatacctttggccaatgcatggataaggcgatcgcgcatacggattatgtcaggaaggcagaagcgtatagcaatcagacgggaaagatccgaagaggcatcggaatcgcggcattctggtataatacggcggtatggccaatctcattagagtcctcttcctgccgcatggtactgaaccaggatgggtccatccaggtacagcttggagagacggagattggacagggggcggatacggcgtttgcccagatggcagcatctacgctgggaatcccgctggaagatgtccatgtgatatccaatcaggacacggatcttacgccgtttggaacgggagcctacgcttccaggcagacgtatgtgggcggcttttcgatccagcagaccgcgctccttctaaaggagaagatcttaggctatgcccatgagatgacaaggatgcccgctggaattctgaatattgtggacgggatgattgttagaaagtcggatggaagagaattgctgtccatggaagaactggcgctggaagcgttctacagcctgagccacagccagcatataacggcggagagcacttatcagatcaaaagcaatgcttattcctttggatgcacggttgcggaagtggaggtggacatcgaggcctgcaaggtcaaactggtggatgcagtcaatgtccatgactgcggcaggctgatcaacccggcgctggccaaggctcaggttcacggcgggatgagcatgggaatcggatatggcctgtcagaatgcctgaagttcgatcccaagaccggaaagacgttgaacggaacgctgctggactataagctgtccactaccatggaccatccggaacttaaggcggactttgtagaaaactatgagcctaccagcgcgtacggaacgaaagcgctgggagagcctccggtctgttctgtggctccagctatccgcaatgcagtattcaacgcgacaggagtcggcgtagacacgctgcctctaagtccccatgtcttattcgaggaattccggaaaggagggcttctggatgtatgatataaaagcattatatgaggcagataatatatcgcatgcaattcaattactggaggagcacccggaggcttttatcatcgcaggaggaagcgatgtcctgattcagatccgggaaggcaagagggctggagcagaactggtcagcatctatggattggatgaactgcggggcgtgaagatggaagaagatggaaccatccgcatcggttccctgaccagcttctcccacgttacgaaggatgaagtgataaagaagtacatccatgtattaggcgaggctgtcgataaggtgggcggtccgcagatacggaatatcggaaccatcggcggcaatacctgcaatggagtgacctcggcagattcggcctccaccttatttgcctgggatgccattatcgaactgacggggccgcagggcgtaagaaaggtgccgatccaggagttctatatcaaggccgggaaggtagatctaagacctgctgagattcagacagccatcctgataccgaaggaatcttacgacggctatgagggccactatattaagtatgccatgcgcaatgccatggatattgccacgcttggatgttctgtgaatgtaaaactaaccgcggacagacaagagatagaagatgccaggattgcctacggcgtcgccggtcccgtgcctatgcgcgcgccgtcggcagagaaggcggtggcagggtgcaaggtgtcagccgaaagcgtcgagcggttcgcaaaagaagttctaaaggacatccgtccaagggacagctggcgcgcaagcaaggcattccgggagcatatttcctatgtgctggcgaaacgtgcccttacggaagcgatagagaggtcaggaggtgcggtggtatgagtgacaggcagtttaaaagaattcattgtatcattaacgggagagaagtggaaaccatgatagatgtccgcgcttcgctgacagaccttcttcgcaatgatttccgacttaccagcgtaaagaaaggatgcgaagtgggcgaatgcggagcctgcaacgtgatcatagacggcgagtgctttaattcctgcatctatctggctgcgtgggcggacggaaagaatatccgtacgctggagagcctgatggggcctgatggggaactatctgacatccagcaggcatttatcgatgagacggctgtacagtgcggcttctgtacgccgggctttatcatgagcgcggtggagatcctggagtcaggaaaggaatattcaagagaagaattaaaaaaaatgctttccgggcatctatgccggtgcacaggttatgaaaacattatcaatgcagtggaaaagacgatgaaaaaaaggctgggcatttaatctgtccgcgtcagtcccaagaataagagaggggcaagagcagggatatcctgctgccggatgcgtgtatcctacagagtggccttgatatccaagccctctcccttcttgcggctgttcccgatagttccatgcctgcagaagcagtcctcttgcttcctttttatcttggttattgatatctgatttctttgtctagaatacatctatttctaacacctcgaaatatcctctttggaatcctggatgaaactgcctgtttcaggcaaataatagaatgatagaaagatgattgaagacaacaatatattgtggtatgatgttggatagaatcaataaattgtatgtgaggtagacgtgtatatgagaatcagcaagaggaacggaacaaatgaagcgtattgcccggaaaagatcaagcgggcagtcagcctggcattccaaagtgtaggaaatctgctttctgatgaagaggcagacaggcttcttaagaatgtagagcaaaagattgatgatagaattacagaagagccatccgtatccgtggaggagattcaggattttgtggaacaggcgctgatggaagcaaatcattataaagaattaaaaagttatatcttatatagagaggagcgggccagaaagcgaaagtcaagaaagaagctggctgacaagattccggcctttgaccggctggctttagtactagcggatatccagaaggaatttacgcaggaagagtatgacttggagcatctgtatgccaagttccaggcttttggaaagccggaacttaacgaccaggagaaactttctatgctgatcaaggcggcggtagaactgacgacccaggaagcgccccagtgggagatggtcgcggccaggcttctgatgctggactttgagcaaaaactagaaaagaatatgagacgctgccatatcgaatgcttctatgacaaactggcatatcttacggaacagggcttatacggagactatatcttaaaagcatatgatagggacgagatagagcgtctggttctttttatcgagccgaagcggaatcatctgtttacttatagcgggcttgaactgctgcttggcagatatgtaatccgcacgggaaagggagtgccgatggaatcgcctcaggaaatgtttctggggatcgccatgcatcttgccatgaaggagaagaaggacagggaatcgtgggtcaagcgtttctacgatatgctaagccagctgaaggtgacgatggccacgccaacgttgtccaatgcaagaaagccctaccatcagctgtcttcctgctttatagacacggtgccggacagcctggatggaatctacagaagcattgacaattttgccaaggtcagcaaattcggcggcggcatgggtatgtatttcggaaaggtgcgggcaagcggcagcgcgatccgcgggttcgaaggggcagcagggggcgttatccgctggatcaggctggccaatgatactgcggttgcggtggatcagctgggcatgcgacagggcgcggttgcggtttatctggatgtatggcaccgggatctgccggaatttctgggccttaggacgaataacggggacgacaggatgaaggctcatgacgtattcccggcagtctgctatccggactacttctggaaggaagcaagggataacatcgaaggagactggtatctgatgtgtcctcatgagatactgacggtgaaaggctatgcgctggaagattattttggagaagactgggaagaaaggtatcaggactgcgtccgggattcccggatacagaaaagggtcattcctatcaaggatattataagactgatcatcaaaagcgcggtggagacggggacgccttttacgttcaaccgggatacggtaaaccgcgctaatcccaacagccacaagggaatcatctactgcagcaacctgtgtacggagatcgcgcagaatatgagcgccatcgagcaggtggagcagaagattgaagagatagatggggagacggtggtggtgacggttacaaagccgggcgaattcgtggtgtgcaaccttgccagcctctctcttggaagattggaacttgcagatgaggaggagatagcctatataacggagagcgccgtaagagcattggacaacgtgattgacctgaacttcttcccggttccctatgccaggatcaataaccggaaataccggcccatcgggctgggagtcagcggctatcaccacatgctggccaagcatgagattgcctgggagagcgaggagcatctggaatttgtcgagaaggtgtttgccgatatccactatgctgccataaaggccagcagcaggattgccagggaaaagggaagttacgaatattttgaaggaagcggatggcagaacggcagctactttgccgaccgggggcttacggatggccggtgggaggaactgcgggcggaagtggcggaatatggccttagaaacggctatcttcttgccgtggcgcctaccagcagcaccagcatcattgccggaaccaccgcagggctggatccgatcatgagccgttacttcctggaagagaagaagaacggcctgatgccccgggtagcgccggaactatccatggataacttctggtattataagaatgcccattatatcgaccagtactggtccgtgcgggcatgcggagtcaggcagcggcatattgaccaggcccagagcatgaatctgtatattaccaatgagtataccttccggaaagtgctggatctctatatactggcctgggaagagggcgttaagaccatctattatatccgctccaagagtctggaagtggaagaatgcgaagtatgctcttcataaatattcgaagaagtcggaggaaacgatatgtctgaattaatgaaaaagccgctgtttaatccatccggggatacgcaggtgaataagcgcaggatgattggcggcaatacgacgaacctgaatgattttaacaatatgaagtacgactgggtcagcgactggtaccggcaggccatgaataacttctggataccggaagagatcaacatgggcgtggatatcaaggattaccgaaaactgccgcaggcagagcggagagcctatgacaagatcctgtccttcctgatcttcctggacagcatccagacggcgaacctgccgaatatcggggaatacattacggcaaatgaagtgaacctgtgtctgtccatccagactttccaggaggctgtgcacagccagagctacagctatatgctggataccatctgcgagcctcaggagaggaacgatgtcctgtaccagtggaaggaggaccagcaccttcttaagaggaatgagtttattggcaatctgtacaatgaattccagaagaagaaggatgcaggcgtgctggttaagacgctggtagccaactatattctggaaggaatctatttctacagcggattcatgttcttctataatctgggaaggaataaccggatgcccggctctgtccaggagatccgatatatcaaccgggatgagaatacccatctgtggctgttccgcaatatcctgctggaacttaagaaagaagagccgcaattatttacggaaagccggatagaagaataccgggagatgataaaggaagggtgccagcaggaaatcagctgggggcgttacgtgatcggtgacgatatccagggattgaaccgggatatggttacggattatatccagtatcttggaaacctgaggtgtaccaatctgggttttgtgccaatctatgaagggcacgtaaaagagccggacagcatgtcctgggtaagccagttttccaatgccaatatgatcaagacggatttttttgaggcgagaagcacggcttacgcaaaaagcagcgctttggtggatgatttatagaaaggggcctggaacagtggagtatcagtggacaaagcaagacggcgcataccaggaatccgacgtgcctgcaagacagaactgccggatcaatattatgacggaagaggaatttataaatgaaaggtggttccggtggttcccctgacggcctcccgggccttctcaagcagcgtgatcaaggcggttcgcccttctttggaacttgcaaagtctacggctgcctgtactttggggagcatggagcccggcgcgaaatggccttcttccatatactgcctggcttcgtctatagacagatcgccaagccatttctcctctggctttccaaagttgatcgccactttttcaaccgcggtcaggatgatgagataatccgcgtccagttctttggcaagcaggcagctggcgaaatctttatcgatgacggcgcttgcgcctttgaggtgattgccctggcggacgacaggaatgccgcctccgccgcaggcaatgaccagatcgccggattctaccatgttccttatggtgccgatctctatgatttccactggctttggggaagcaaccacgcggcggtagccccggccggaatcctccatcatgatatagtcgtatttctcttccatctcccgggcctgttcggcggatacgaacttgccgattggcttggagggactctggaaggctgggtcgttctcatccacgcgtacctgggtgatcatggtagcaacgggaatgtctgtgatgcctcggttcagcagttcttcacgaagcgcgttctgcaagtcatagccgatataagcctggctcatggccacacagacagagagaggagtattgggctgctctttatcttcatgcgtcagagcaatcatggcattgttcaccatgccgacctgtggtccgtttccgtgggcgacgacgacttcgcagccttcctctatgagatccacgattgctttggcggtaatcttaacagctgccatctgttccggcagggtgttcccgagcgcattgccgccaagcgcgattacaattctttttttctttgccataggttaagcctccgcttcttatttgaatactcttggcttgccgttttcttccagttttttaagaattaccgccggatcagcgaatttggccaggaagatcatggcagctatgatataaggcttatagctggcttccttgtataatagggtacggtagcggtcgaatacgcttgcatccacttcgccggtctcgcagcttacgcctgtgatatccgccggcaggcagtgcagatagagcgccttgccgtctctggtggtggacatcagttcttccgtacatgcccagtccttatgctgggcgttctgtgccagaagttctttctcaagagcatctatgccagcctggtcgccctgtgcatagagttcggttctctgttccattgccgcgaatggagcccagctctttggatagacgatatcggcatccttgaaggcttctgccatactgttggtcttggtataagagccgccggatttctttgcgttttccgccgctacagcctcaacttccgggaatacttcgtatccttcagggtgtgccagcacgacgtccattccaaatcgtgtcatcagtccgatgacgccctgcggaacagagagcggctttccataggaaggagagtaagcccaggtcatggcaagtttcttgccttttaagttttctacgccgccgaattcgtggatgatatgaagcatatctgccattacctgcgtgggatggtcaatgtcgcactgaaggtttacaagggtaggcttctgctccaggatgccatccttatggccctgggtaacggaatccaccacttcgtgcatgtaggcgtttcctttgccaatgtacatatcatcccggatgccgatgacatcggccataaaggagatcatgttggctgtctcgcggatcgtctcgccgtgggcgatctgggacttgccctcgtccagatcctgtaccttaaggcctaagaggttgcaggcagaagcgaaggagaagcgggtgcgggtggagttgtcacggaataaggagatgccaaggccgctttcgaataccttcgtggagatattattctcccgcatgtagcggagcgcgtctgccagcgtaaatacggcttctatctcgtcgtccgtcttctcccaggtgagaaagaagtttccattgtacatttccttaaagttcagtatgtttaatttatcaagataatcctgtaatgttttcataattcatatcctcctgatattgtgatactaagatacaaagggctgcctggggcaagagcctacttgcagtacatggctggcagggccgcatagacggcggcgcaccttaccagatcgtctttccaggtcttttcgttaggagcgtgagcctgggcctccgcgcccgggccaaagcctatgcaggggatgccgtttcttcccatgatggatacgccgttggtggagaaggtccatttatcagtcaggggcctgttgatccgggatggggccgtctcttcattccccaggcgcttgtcgccgtagagtcctttataggccgcttccagagccttggtcactttatggtcttgtgggatgacccaggtcgggaaatagcattcgatgggatagacgcatccggtgtaggatggacggtcataattgtacatggatacttctacatcgtctccatacttctgtacgcttggcagcgcgcggatctcatccaggcagctttcccaagtctcgcctgcggtcatgcggcggtccagagagactgcgcaggagtctgcaacggcgcagcggctgggagaggtgtagaagatctgggaaaccgtgacggtcccttggccgaggaagcgggcttctttccactctggattatatttctcatccagcatctttaccaatcctttgatgctggttttttcatctgcgtcattctcatttaacgcgcggatttccagcaggatatctgccatcttgtagatcgcgttgtctccgcgctccggagcggagccgtggcaggatacgccttttacatctacgcggatctccatgcgtccccgctgcccgcggtagatgccgccgtcggtaggctcggtggatacgacgaattcaggctttacgccgtcctcgttgatgatgtactgccagcataggccgtcacagtcttcttcctggacggttccggtgactacgacccggtatgtatcatccagaagtcccagatccttcatgatctttgctccatatacagcagatacgatgccgccgcactgatcagaagttccacgcccgccaatctctgtctcggactcaaaaccttcataagggtcgaactcccagttgtcgatgttgccaatgcctacagtgtcgatgtgggcgtcgtagccgatcagcgtcttgccggttcccatgtagcccagcacattgccctggggatcgatctctaccttgtcaaagtctaatttgcgcatctcttctgcgatccggtcgatgtgggctttctccccgcagctttctcccgggtatttgacaatatcccttaagaatctggtcatgtctgcttcatatttctgtgccgcgtcttttatccgattaaaatctaacattttttcttacctcctatatgccttcaaatggttctttatcggttccgcataagccttcccagacgatttcccggtaacggtccggatcggtatcgccttctgaggataccagcaggacttcggaactgtcatccagcttcagtgcttcccttaactctctgtactcaggcttggtcataagggctgcaaccagtcccatggtgacggagccggattcgccggagaagactctgtcatcgccgcgaagaggcgccccatagatacgtgttccgttggcgcttacccagtccgggcaggatacgaatgcgtctgcatgatttctcaggatatcccaggatacggtgttggcttccccgcatgcgaggccggccatgatagtcagcatatccccggtgacatcgatcctgcttccgtcgcccttgacggcagagcggtagaggcagtcggcagccatggcctccacgacgaccatgatgggcggattctccttaaagcggttggcaaaatatccgatgaccgcacctgcaagggacccgacgccagcctggataaagatatgggttggacggcatccatccttggcaagctgctgatcagcttccagggcaagggttccgtagccctgcatgatccaggtagggatctcttcatagccttcccatgcagtatcctgcaccataatgccatgttccgtattctcggcttccttggcggccatccgcacgcagtcgtcatagttgagatcctcgatggttacggtggcattttcctttgcgatattttcaagacgggtctgggtagagcctttcggcattcttaccacgcatttctggcccagcttgttggcagcccaggcaatgcctcttccgtgattgccgtcggtcgcggtaaagaaggtggcctggccgaattcttctctcagttctttggaagtaagcacatgataaggaacctcgcttacatcctttcccagctgctgcgcgatgtatcttgcgatggcgtaggaaccccccaatactttgaaggcattcaggccaaaacggtaagactcgtctttgacgtacagccgtttcaggcccaagtactccgccagattggaaagcctggtcagcggggtcacgctatactggggaaaactttgatgaaaggcgtgcgccttcgccatctcttcccccgacatattgcgcgcttgcaggtcatccgtcttcggcatggtattgagtgtccattttaattgattatctgatgctttgctcatgatcgatctcctctaaatcatatatttatttgttgatatctacataactatagagtgtgtacttggagatgccaaagtacttggcaactttatctccggactttgtaataagaaaggcgcctgcatcattgaggaaattaatcgcctttatcttatcttccttgctcatcagaggtacaggcactccaaccagcgctacggactgctcgattaattcatccagaagttcatttacgtcgtgggtaatccgctttggagagttgaaatcctcgctgccggattcctctgggatcttgcaggcggtgagagagtggatgctcccttccagagccagaagattggtgatgtcgtaattaatggacagtatatagcgcggttttccgctgtcgtcgttaatatagatggtactggactttaagatgcgtccgttgtccgtcttggtcaagtaggacagtttgtcggcgagcggtccgtcctgatggcggatcgcattgagcactgcgccggacggcccgtcgcctaccttccttcctgtaatatggccattttcaatatggacaatggaactttccgctacattgcgtgccagatcgtgaaccacgacttcgcagttatcgccgaactgggctgcaagtcctgtagcaatctgttttaacatgtctaacctggaccctgccatgatcgtacctccttcgtaaggtttttcgtctccctaagttcatcatagcagataattttagaaaatcaatagaaaatctaaaaaatttttaggaaacaaaaatatttttgtaaaacccgttgcaaattatatataatgatgataatatggtagaaacagaagcgttctttgtaaaaagtgtacgaaaaacagcaaaggaaaagaagagaaatattaagcagaatgccgggctgcatggtctttcctgcctgatgcggacagagaaatcgacagatatcccaatgccaaatccgcagggaagaaccggcctttatacaaaaggcagaaactacaattttataatgcagactgtgaagatgccggtgggcgccatgggaaaggccggtatccgggcagcctgcagcaaggctctccctagatatttgagggagataaccgggaggtagaaatgtaaccccggcaattataataggaggaatcgcgcaaagaaaaggcgagatcagccaggcgaatattacggttctggtgcagtcagcgcttctgatagcaggcatatccaccctgatccagctgatttccttcaagtatacgatgggctccgggctgtcggtcattatcggcgtcagttttgcctatctttgtgcctgtagggaattgcggagcagtttgacctggcaaccctgtttggagcccagctggcaagctccctggctgccatactggtggggatatttattaagaggctcggattcctgtttccgccttccaacggcgacattcattcagaatgtagggattgtggcgacaaccaaggttgtggcaaaaagggtattctatgattccggcctgcgtgcttggcggggccgacgataagcgtattctcatccatagccatgacggaaatgaaactgatcgcgggaaatcagcggtggtattatccaccatcgtaacggtggtgctaaaccaggtacttccaaaagaacaagaagaagcagcagaataggaggcggacatatgttaataataggaaatggaaagacaattacaagggatgctaatctcccttttatagaggacggggcggtggccatcgagggaacccggatcaaagaagtaggagccaccaaagatatgaaagagaaatataaggatgcagaatacatagatgccagaagcggagtcattatgccggcgttcatcaatacccatgagcatatctacagcgccatggccagaggattaagtattaagggctatcatccgaaaggatttctggacatcctggatggccagtggtggaccattgacaggaagcttacgccagaacagattcgatacagcgcggctgacaccatgatctcctgtatccgtaacggcgtgacgacgattttcgaccaccatgcaagtttcgggcatatcaaagacagcctgtttaccattgcggaggtggcgaaggaactgggcgtacgctcctgcctgtgctatgaagtatcagacagggacggcatggagaaggccagagaggcggtcatggaaaatgcggcgtttatcaagtacgcgcttcaggatgactcagatatgctggcaggaatgatgggaatgcatgcgcagtttaccatctcggacgcgactatggaactggcagctgccaataagccaaaagagacaggatatcatatccatgtggccgaaggaatcgaagaccttcatgactgcctgaagaagtatggcaagcggatcgtggaccggctgatggattgggatatactgggagagaagacgctgcttggccactgtatctatattaattcccacgaaatggatctgatcaaagatacgggcacgatggtggtccataatccagaatccaatatgggcaatgcctgtggctgtcccccgactatggagctggtgcgccgcgggatactgaccgggcttggaaccgacggatatacccacgatatgacggaatcctacaaggcagccaacgtgctgcataagcatcacctgtgcgatcccaatgcggcgtggggcgaagtgcccaggatgctttttgagaacaacgccgttattgctggccgctattttaaagcgcctcttggcgtgctgaaagaaggggccgcggcagatgtgatcgtcgtagactataatccgcctacccacctggatgagaacaatatcaatggccatattttatttggaatgaccggcagagatgtggcgaccaccgtcggaaacggcaaggtccttatgaaggaccgggaagtgaaagtgatcgatgtagaagaaaccatggcaagatgcagggaagagtctgcgaaactgtggaagagcatcaatgattaggaggaagggtatatgagcgatattatgacatgcatgccttttgagcaattgttagattggatcaggacagagcatgatacaaaaggaaccgtatttggcgtacacagaccttatgtggcggcagaaggcaggaatctgtccatcttcggaaggaatctggagacgcctatcggcccggctgccggacccaacagtcagctggcccagaatattgcggcggcctattatgcgggctgccggttctttgaactgaagacggtgcagattatggacggcgcggaactggcggcctgcgtgaataagccatgcatcaaagcggatgacgagtgctataactgcgagtggtccaccgaattgtatgtgcctcaggcacaggaagaatatatcaaggcgtggttcctcctggcattcatggccagggagtatggacttggcagcatgggtggctaccagtttaacatcagcgtaggctatgatctggcaggaatcaagtcgaagaagatcgacacctttatcgaaagcatgaaggatgcatctgctaccgagacgttcagggaatgcaggcagtatctgctggaccatgtgtcggagtttcaaaatgtggcgaaggaagatattgaagggatatcagcctgcatctgtaactcagccaccatctccacgctgcatggatgtccgccccaggaaattgaaagcattgccaactatctgctgaaagaaaagaagatgcatacattcatcaagtgcaatcccacgctgcttggctatgagtttgccagggaaacgcttaataagatgggatatgactatgtggcgttcgggcacttccattttgaagacgatcttcagtatgaggatgccatcccaatgcttggaaggctgatggaactggcggagagcctggaactggaattcggggtcaagattacgaataccttcccggtggatgttaaggccggggaactgccaagcgaagagatgtatatgtcaggaaagtctctgtatcccttatccatctcactggccgcaaaattatccgaagcatttgaagggcgccttcgcatcgcctattccggaggcgcggacgcatttaacatagataagatcgtggggaccggcgtgtggccggtaacggtagccactaccatcttaaagcccggcggataccagaggcttaagcagctggcagagatgctggacgatatgggggttttgccctttaaaggaatcgatgtagaagcactgaagcgggtagcggaagatgccattacagacaggcattatgtaaagccggcaaaactgccggtatccaggaagtcgaaggaaaaggttccgcttcttgactgctatacggcgccttgcgagaatgcctgtccgatccaccaggaggtcagcgcctatatgcagctggcagggggagagaagtatgaagaggcactgcaggttatcctgaaccggaacgcgctgccatttattacaggaaccatctgcgcccacggctgccagagccactgcacgcgcaacttctatgagtcgccggtgcagatccgcgataccaagctgcagtgcgcaaaggccgcatatgagtctgttctttcatccctgaagaagcgggattgctgccataagaaggtggccatcgttggcggcgggccatccggcatggcggcagccttctatctggcaaggatgggggctgacgtcgccatctatgagaaacggcagaagctgggcggaatcgtgagcgcagtgattccggactttcggattgatgacagcgtgattgaaaaggatgccgctctgcttgagaaactgggggttaaggttttctatggcagggaagtcacttccgtcgcggaacttcaggaagaatatgatgcggttattcttgccgtaggcgcgtataagcggggacagctcaagctggatggcaaggaagtaagaaatgcgctggagtttctggaagaattcaatcgggcgaagggaaaggtcaatcttggcaagcgtgtggtggtgatcggaggcggcaatacggccatggatacggccagggcagccaagcggtgcgcgggcgtagagtacgtatacctggtataccggcggacgaagcgatacatgccggcagacgagcatgaacttctgttggcgattaaggacggggtggagtttaaagaactgctggctccggaccggatggaagaaggccgcctgatctgcaaggtgacgaggcttggcgagccggatggctccggacgcgccagtgtcatcgtgacggatcagacagaggaaattcctgcggatacggtgatcgcggcagtcggcgaacaggttcctattgacttctatgaggccaacggcatccatgtggacggcaagggccgcgccttggtaagcgattccctggagacaaatcggaagggcgtttatgtgatcggagacggattattcggaccatccttggtggtaaagggcatggccaatgcaataaaggtagcggagtctattctgggcatggaaatatccggcagtatggcgaaggcagccagggaagaagagatctacgcaaagaagggaattctcgcggaaccgggacagaaggaggcggacagatgcctaagctgctctaccgtatgcgaaaactgcgtggatgtctgtccaaaccgggcaaatatatccattcacgtgccgggtatggacaaaaggcaggtcatccatgtagactatatgtgtaatgagtgtggtaactgcaagagtttctgtccatataaaagcgcgccttatctggataagtttaccctgttcgccagcgaggaagatatggcagacagcaggaatgagggatttacagtgctggataggggaaaggcctcctgcaaggtgcggtatctgggtgaagagttcgcatgggaaaagggaaaagatgcgaaacttccgctgggccttatgagactgatagagaccgtgtgcagagactatacatatttactttataaataataactaagatttgtatagaaagaaggcagatgctatgaaacgattattccgcggcggcaccgtggtaagcggtgacggacttaaaaaaatggatgtcctggtgaagggtgagaagattcttgccatgggcgaggatctgaaatttatagacgcagagatagtagacgtgacggggaaactactgtttcccgggttcattgacccgcatacccacatggatctggaggtgtcgggaaccgtgactgctgacgggtttgatacaggaaccaaggcagaaatcgcaggaggcaccacctgcatcatcgactttgccacccagaataagggggagagcctttcctttgcccttcagcattggcatgaaaaggcctcctgcaaggccagctgtgattatgcgttccatctcgccctgtccgactggaaggatgagatctgcgaggaactggaagcggtggcagcaggcggaatacattcgttcaaactatatatgacatacgatgccatgatggtagatgataaaagcatgtatgaggttctcttaaggcttaaggaactgggcgggatcgcaggcgtgcactgcgagaaccatggcatcatcggggcaaggcttgatgagacgctaaggaacaaaggctccaggaaaaatgtggcggattatccggacaccaggcctgctctggctgaggccgaggcaatcggccgtctgcttaagattgccagatgcgtggatactccggtcatcatcgtgcatctaagttccaaggaaggatacgaagagatccgaagagcaagggatgcagggcagacggtgtatgtggagacctgtccgcagtaccttctgctggatagaagcagatatgagttggaaggacaggaagccaggaaatatatgatcgcgcctcctttaaggaatcaggaagaccaggaagtactgtggaatgccctgaaggagggaacgatacagacgattggaacagatcactgcagttttaccgcccagcagaaggagatgggggcagaagacttctccaaaacgccctgcggcatgccaggagcacaagagcggccggcgctcatctatcatttcggcgtgaatgaaggaaggattactttggagcagatgtgcagctatctggcagagaatccggcgaaactgtaccacctttatccaaggaaaggggcaatcctgcctggaagcgacgcggatatcgtggtgtggaatccagagactgcgtggacccttgccgccgaaaaccagcagtcggcatccgggttctgcccgatggaaggaacgcaagtcaaaggaagggcagagcaggtctatctgcgaggaaccctggtggcggaaaatggcgagattaaagaagcatatcaaggaacgcatgtaaaggcagaagcatgaggatagaaagttatatagaggacggctggaaaaagcaaggcagcctgtatgaagcactaggattaaataggaaagagcccgggattctctcggtcgtgggagcaggaggaaagacgacggtaattgccaggcttatgaaagagcatgaaaagagaggcattcccgtcgtggtgtccaccactacccacatccagcagatcaaagcatcttattttctggataagccgtccgggcaacgcatgagacagatcctgaaggataagggaaaggtctggatggggtatccctgcgggaatgggaagatcaaagcatttacggaacaggaacagaagaaactgcttgacgaggcaattgcgatgggagcctgcgtgctaattgaggcagatggggcgaaagggcgtccctgcaaggcgccggcggactacgagccggtacttcaccccgatacggtcctggtgctgtcggtctatgggctgcaggcaatcggcgcagccatcgaagattcctgcctgagagttgataaggtggaggaaatattgggaaagagtggtcaggatatcctgaccactcatgatatagcgatattagccgcaagcagaaaaggcggaagaaaaggcgttgcctcttctatggattatcaggtgattctgaatcaggcagacgatgaaaggttaaaagaggcagcggctggaatcggagaggaacttttccggcaaggcattcgaagggtacacaggacgacggggctgtcagaagagaccggacagttacgggtatccgggcagacaagattaggtggacaggaggggacggaagaatgaagatcttgataaagggcgcgggggatctggccacaggaattgcggcgaggctgcatgcgtgcggttataagatagtgatgacagagatagcggttcctcttactgtgcgaagatctgttgcattttccagggcggtctatgaagaagaggcccaggtggaagatgcgtgggcagtcctggtgcaggatatggaaggagccggggccgtgctggaagaaggaaggatagcggtgatcgtggatgagactgccggcattcgggaatcgtatcggccggaagtggtgatcgatgcggtgatggcaaagcgaaacataggaacctgcatcacggacgcgcctttggtcatcggaatcggcccgggatttaccgcaggagaggactgccactttgtcattgagacgaagcgggggcacgatcttggacgggtgatcgcgaaaggttgcgctatccccgatacgggcgtgccaggagagatcggaggatatgcgtccgaacggctgataagggcccaggcggacggaatcatggagccttgcgccatgatcggcgatgtggtggaaaaaggacagaaggtggcagagacaggccgcgccgcggtatatgccgagatgacgggaattgtccggggaatgctgcagccgggcgtgaaagtgacaaagggattaaagatcggcgatattgacgcgcgccagtgccgggagtattgcgagaccatatcggataaggcgaggagcatcggcggaggcgtgctggaggcagtgacgaggtacgagcggcagaaatatgaatggggcagcaggtatgccatcatccttctggctgccggaagcagtgtcaggtatggcgccaacaagttgcttgaggagacgggaggcatgcccatgtatcagcatatgctgaaggccttaagcacgtttccggccctccataggattgtggtgagccgctatcctgagattcttgaggatgccgaaaggctgggcatgcaggcggttgtgaatcggcagcccgcacttggcatttcccattccctgatcctggggcttcaggaagccatagcggaaaatacggatctgaaaggcgtcctgtttgccgtgtgcgaccagccgggacttaaggccgataccatcagccgtctgctgcgaaaggcacaggagaatccagggaagatcgtgtgcgcgggaaggaagggaaggcccgggaatcctgtagtctgggatcagagatactttaaggaattgcttggccttgccggagataccggagggcgccaggtaatgaaaaattatcccggagacatcctggtattggagacggcggagggagaactgtgggatatagacaggaaagaagatatgacccagtagggaggggttctatgtatcggttacatataaatggacaaatctatgagacggagacggataagaagcttatccggtacttaagggatgaccttcgcctgacatcggtaaaagacggatgcagcgagggcgcatgcggcacatgcacgttgattgtggacgggaaggccacaagggcatgtattccgatggtgtcaaagatggaagggaagaagattcttacggtggaaggattaagccagcgggaaaaggacgtatatggctatgcatttgccaaggcaggggccgtacagtgcgggttctgcatcccgggcatggtcatgtgcgccaaggctctgctggatgcgaacccgactcctgacaggctggaagtcatagcggcaatccgtaataatgtctgtcggtgcaccggctataagaagatcattgaggcgattcttttaagcgcccggatcttaagagaaggtctgccggtgaaagaagagcagggaaaggttcctgtgggaatggccatgcagaggatcgacgcgcgagaaaaggtgctggggacgggggaatacccggatgacgtctatctggatggcatgatctacgcaagcgcggtcagatccaagtatcccagggcccgggtgctggcgattcatacagagaaggccagagaactgcaaggggtcgtaggcgtatttaccgccaatgacattcccggcgatatcaaggtgggccatctgaagcaggattgggatgccctgatcccggtaggaggaatgactcattatctgggggatgccatctgcctggtggcagcggaaagcatggaagtgctggaagaggcgaagagcctggtggaagtggactatgaagtgcaggatggggtattcgacccattcggggcccttaaagaaggcgctccaaaggttcatgaaagcggcaatatattggcccatgaacatctgataaggggagacgcaggccaggcaatcgccggggcaaagtataaggtgaccaatcattatgagaccccctggacagaacacgccttcctggagccggagacagcggtggcaatgccttttgacgacggggtattcatctactctacagaccagggaacctatgacacgcagcatgaatgctccttgatgctgggccttcccaaggaaaagatcattgtggaaaataaactggtgggaggcggattcggcggcaaggaagacgtgaccgtgcagcaccatgcggcgctggtcgcctatctgaccaagcggatcgtgaaggtgaagctgaccaggaaagagagcatcctgattcatccgaagcgtcatcctatgtggatcgatgtgactacggcctgtgacgaagagggatacctggtggggatgaaagcaaaagtagtgtcagatactggcgcttacgcatcccttggcgggccggtgctccagcgggcctgtacccatgcggccggaccatataacttccagaacatagacatcgacggcacggcagtctataccaataaccctccggcaggggcatttcgtggattcggcgtgacccagacctgctttgcgtcggagatgaatctgaaccagctggcggaaatggtgggcatctcgccatgggagatccgctaccgcaatgcgatccgaccgggacaggtgctgccaaatggccagattgcggatgcttccacagcggtggcggagactctggaagcggtaaaagacatctatgacagcgagccttatgccggaatcgcctgtgcgatgaagaatgcgggcgtgggcgtaggactgccggactggggacgatgccgcctgctggtcaagagagggaaggtccagattcataccggcgcttcctgcatcgggcagggactaggaagcgtgttggtgcaggtgctatcggaaaccacaggccttgcgcttgacgagatcgaatattgcaggccgaatacttccatggctccggattccggcaccacatccggctccaggcagacactggtaaccggagaggcagccaggcgggcggccttgaaactgtgcgaggacttaaaagagcatagcctgagtgggctggaaggaaaggaatattatggagagtatctggcaaagacggataagatgggggcggacgtgccaaacccggtatcccatgtggcttacggatatgccacccagctatgcgcgctgaatgaggacggaaccgtgaagaagatggcggcggcccatgcccttggcaaggcggtcaatccgctgagcgtggaaggccagattgaaggcggcgtggtcatgggcatgggattcgccctgacggagaagttccctctggaagagggaatgccgaaggccaaattcggaaccctggggctgttcaaagcggataaggtcccggagttacagtctattattgtagagaagccgggcatcgaggaggcatacggggcaatcggaatcggagagatcacctccattccgacggcgccggccatagccggggcatattacagatggaacggcaagttccagacgcaattgcctctggaaggaacgccctataagaaatgatagaggcaaggaacgcggctcttgaaaaagcgcgttattatcaggaactgccagattggtccttttttgatatgttctggcaatgtatgctgacttagagtataataggagtaacatttagggagggcatgagattatgtggactagagaacaattgaagaggaatggaaagtttgcttttcagagaaattactggccttgcgttggcgtagcctttattatgacggtggtgtcagcggtcttcagcgtaggcagttcctggggaaaccggagatattcgatatctgccaccaattattataacagcggccatcatcttttcagtcacagctataccagatatttccccaggatcggggcggcaatgggcatcgtcatattgctggtggctctgcttgtcgcgctgcttcggatatttatagggaaccttctggaagtcggcggcaagcgtttctttatattgaataagaatggagccccggatgtggccaccatatttgacggattcaagtccggacattatgggaatatcgtgctgacaatatttctgagggacctgtttatatccctatggactctgcttttagtaattccgggaattgtcaagatttatgagtatcttatggtgccttatatcctggcagagaatccggcaatggatagaaaatcggcttttgcgatcagcaagcggatgatggatggggaaaaactgaaggcatttgaacttacgctttcttttctgggctggtacttcctatccctgatcacttgcgggatagcggggatcttctatgtgaatccatatgcggaggcaacaatggcggaactgtatgcctataataaggcaaaggcattccaggaaggatatatcaggtagcatcaacgcgcgtgcttagaatagtcaaggaggggcagttatggaactggaaagataccgcctgtgcgcagaggcggcaaagaagaatgcgaaggcagaacttgtgcttaagaatgcaaatgtggtcaatgtatttaccggagaagtcatcaaaggggatgtggctatagcagagggcatcgtcgtgggcgtgggccaatttgaaggaattgaggaaagagatatggagggaaaatatctctgtccgggattcatcgacagccatctccatctggagtctacgctggtgacgccttccgaactgatcggccaggcggtgcagtgcggcaccacgacctatattgtggatccccatgaatctgccaatgtttcagggccggcgggaattgactatatactggaacagaccgagaatgtcaaggcgaatgtgtatgtgatgatgccttcctgcgtgccgtctacggaatttgatgataatggatgtgaatttacggccgataagatgaagccttatcttgatcatccccggatactcggccttggggaagtgatggattatgtatccgtggtaagcggggatgccagaatgcatgagaaactggaactattccaagggaggacattggatggccatgcgccagggcttggcgacgaggatatggcagcgtatgcaatggccggaatcgctacagatcatgaatgcacggactttgattatgcgctgaaagaacgacgcttaggcatgcagatcttaatccgggaaggcagcgccgccaggaatctggaggcaatcgtgaagggaatcgtagagcatggaatcagtacggaaggcttctgcttctgcacggacgacaagcatatagaggagattcaaaaagatgggcatattaattataacgttaagaaggccgtggaattaggcatccctgccgtacaggcaatccagatggccacggtcaatgcggcaaaatgctatgggcttaggcatatcggggcgattgcgccgggatatcaggccgacatcgtggtgctggatgatctatgcagcatgaatgtcagcgaagtgttctttaaagggaggaaagtaggcaggaatgaactggataagagaagagaatgcccgagtggattgaagcacacgatacatctgaagaacttctcaaaagaatgcctgaaacttccgctgcaagggaagcgtgcgcatgtcatccagatggaggaagggcagatcaccacgaaggatattgtatgccgggttccgggagagaaggagttcgaggcaaacggagaattcaataagattgccgtgatcgagcggcataagggaaccggcagaaccggagtcggcatcctggccgggttcgggcttcacggcggagccatcgcttccagcgtctcccatgattcccacaacatcatcgtcgtaggagataatgatgaggatatggaactggcggtcaatgaactggtacgcacccaaggtggctataccatcgttgagaatggagcggtgtctatgacgctggcgcttccgatcatggggcttatgagcgacgcaggatatgaaaatgttaatgccatgcttaagaagatgctggtgaaggcacatcagatgggcgttccggaagctatggagccatttataaccctgtctttcatggctctccctgtgataccggaactgcggatcacgccaaggggactatttagcgtctccgagttttgcctgcttgatacaattaggaatggagaagataatggcaattaacagatcaatgagaatggttcttaaagcactgtcgtttgacggaatagaggtagaggcttcccggcatctcgcgaatctcaaagcgatcgatcctatgaagatattctaccgtaccatggattataagatatataatgatgactatgagattccggtgaggatctatctgccaagggaaaaggagacggaaggcctgccagtcatgctgttcttccacggcggcggatgggtgaccgagagcatcgataattatgagcgcatctgtgccaggatggcggaggccacgaaccatatcgtggtatccgtgggctatcggctggccccggaatataagtttcccacaggcttaaatgactgctatgcggtggccaaggccgtgtatacgaatcgcttcatactggaggtggatccggaacggattacgctgatcggagacagcgcgggaggaaatcttgcggcagcgctgtcgctgatggcaagggataagggagagttcctgccaaagcgacagatcttgatctatccggctacgtactgcgactatggggagaatacgcctttttgctctgtgcgggagaatgggagcgactatcttctgacagccggaaagatgcaggattacatcaatctgtatgcttcctgcgaggaagataagagaaataaatattttgcgccgctaagggagcgggatttttcgaatcagccaaagacattgatccttacggcagaatatgatcccctcagagatgaaggggaagcatacggcaggcggcttgccaatgccgggaacgaagtggagatccaccggattaaggacgcgctccatgggtattttgctcttggaatcaagtattaccatgtccaggaaagttttgagattatcaatcagtttttaagggaggactagccagtgtttcagcaaaaaagagcatattggaggaatctggataatgcagcgaagttattttccgccacaagcagtctgaaagatacccgggtattccggttctactgcatattgaaagaagagatcgatccagaacttttgcaggaggcattaaaccggacggtcaaacgatatccggtattcctgtctgtcatgcgaaaggggctgttctggcattacctggaaaagagcgagttaaggccggttataagagaagagtacaaggagccttgcagctgcctgtatgtaagagacaagaaggcgcttctgtttgaggtgacctattatcacaaccggattaattttgaagtgttccacgccttgacggacggaaccggggctacccagttcctgcgcgaattggtaaagaattacctgcatctcgcgcatcaggaggatggccttgcagatgtgatactgacggatgagaaggttacgatacgcgatcaggaagacgatagtttcagcaaatattacaatccagatatgaaaaggagcaaaaagaaaaagccgcatgcttaccagataaaaaagatgcgcaaagaatatgatgagttacgcgtaatcgaaggcacggcatcggtaaaagatgtgcttgcggtatcccgggaaaagggcgtgtctatgacggtactgcttacggcagtctatctgtgtgcgatccacgaggagatgtccaggcttcaggaaaagcggccggtaatattgatggtgccggtgaatctgagaaaggtatttccatcggattccatgttgaacttcttcggatatattgagccgttacacaaatttggcgaaggccgcgacgaattttcagagatattggaagaagtaaaagaatattttgatgaaaatctaaaaaaagaacagattgcccgtggtatgaatgaattaatcgcctttgagaagaataggattcttagatgggcgcctcttgaacttaagaatccctgtataaaagtgggagcaaaaatggcggaaaaggaagtgacagcaatcctttctaatatgagcgcggttaggatgccggaggaatatacgccgtatattgagcgtttcggcgtctttacaagcacgccgaaggtagaattgtgcgtctgctcgtttcaggacgtgctttcctttggcttcacgtcccgatatgacagttccaatatccagcgtaatttttaccgtatcttggaagaactggggattcccagcaagattgaaaagccggatttcccggaagaagtgaggccgaattatgagggaatgaagttttttaaggtgttctcattctgctgcatcgcggcagttgtcataggaataatgggaaatgtcatatttacgcctgaaagatactgggcagcgtttgtcgcggcgggggcgcttagcatgtggtttgccctggctgtgggatatctgaagcggcataacctgcttaagaacgccatgtggcagctgcttgtggtgacgattgggtgcatcctatgggacttgtgcaccggatggcatggatggtcggtaaattatgtgttgccgggcgtctgcatgatcatccagatctccatgatgatcatatcaaagattcaatcccattcgccgcgggagtatatgatctattatgtcatggcagcgggatatggaattctttttccgttcatactattattgacaagggtcatcacgtttactgccccggcggtggtgtgcgtgggattcagcttcttattcctgcttgcgcttatcctgtttaagggacgggagttcaaggaagagatgcataagaagttgcatgtataaaaatggcatgtataaaaaagtatgtaaaaaggagcatgattctatgggaaaacgagtattcctgattgtactggatagcgttggagtaggcgaagcgccggatgcgggcaagtttgacgatgccggatgcgatacatttggcacctgtgtccgaagtggcaagctgaatgtgccgaacctggaagccttaggcatttatcatatccaggggacatctttttacaatccggggaaagaggtggccggatgttatggccgtatgcaggagaagtcggcaggaaaggatacgacggtagggcactgggagatcgcgggcgtcgtgtcagaaaaagcaatgcctacttatccccatggatttccgaatgaaattattgagaaatttgaaacgagcaccggaagaggaacgctgtgcaatcttccatactccgggacagatgtgatacgggattatggaagggagcatgtccgtaccggaaagctgatcgtctatacttccgcggacagcgtattccagattgcggcccatgaagatgtagtccctctggaagaattatatgaggactgtaggaaggcaagagccatactgaaaggcgagcacggcgtaggacgcgtgatcgcaaggccctttgttggagaatatccggattatgcaaggacggtgaaccgtcatgatttttccctggaaccgccagggcagacggtgctggatgcgcttagggaggcagaatatgcggtcatcggcgtaggaaagatctatgatatctttgcagggaaagggataaccgagacctatcccaatgaagggaatacccggaatatggaacgtaccctggaattgatgaacagagatttcgaagggctgtgcttcgtgaatctggtcgactttgacatgatgtacgggcacaggaatgatatcgacgggtatgcagcggcgctcaacgaagcggatatccagatcgggcggctgatggagaagatggggcctgaggatctgttgatgattacggctgaccatgggtgcgacccgggctttaaaggtacggatcacagcagggaatatacgccctgcctgtgttacggcaggaatctaaagaaaggaatcgaccttggcaccagaagcagttttgccgatatcgcgcagacgatcgcagacgtattcggggtggcatacggaggtgacggagaaagtttttacaaaaatattcttacatcaaaataatttacatgatataatatagcgtatagaggaattatgtcggtataaaaagaacttcatagatgtaggtccagacaggagggaattatgtgtttaagattggtgattatgtaactcattataaagaaggggtctgtgaagtaattgatatcggaaaactggacatgagatgttcggacagaaagaaggaatactatacgctgaggccattatatgatgccggtggaacattgtatatgccagttgccaacgaaagaaaccagatacggggagtgattacttacgaagaagcccgggctttgatagaggatatcccgaatattgaagtgttgtgggtgactgatgagaaaaagcgggaagccttgtataaggaagcggtatttaagaatcagtgcaaggaatggctcgcgattatcaagacatcctatctgcgcaagatggaccgtctttcttccgggaaaaaatcaataaatgtagacgataaatatctgagcattgcagagcagttcctgtatggggaactggctgtggctcttgaaatacccagggaaaagattcgcaagtacgtcacggagcggatgggaacactggaggcatagaagaaaaaggctttctacagttaggcggaggctcataaggaaataaatgaaatttcccggtagaaccggcgtggtggaaatcacgccggtttttccgtgcttgcaggcagtttaggtttttgaagcggaatccgaatcttgcctacataagtaaaataaatcttaatcgtcatatgctttcttccgtttcttctgtgatttcccgttccagtgcttcgggaaactgccggatttctgcctgttccgtctcatattgtgctgataacttttgaaaacggatttccgcttctgcgtcagttctgctttccggctggcttcatcctgcagtaacatttcctgtgtaaaatcatccttaaacaatcgaacataggtcagagtccgctgttttctacaatagacatgtcatgtagtcgctttgcaggtcgtcgtactgcaaggaaagacgcaaataaaacaatagcaattatcgatccaagaggaacaaaaggaacactccatgcagttccccatatatttgtaattaagctcacaaatataacccaatgcataggtactcctatgatacagcctaaaagaatacctctgattgcatacgttccggcttctgcataaatcatttttgaaagctgtcggttactcataccgattgcccgcattgctccgtactctttcattttagcagcaactcccatgctgattgtattcataatgtggaaaatagtaatggcaacaataattgagaggaaaccataaacaagtacagaaaacgcacgatacaaatttctttgctgctgcacttgagcaagtttgtcagcaaatataacttcactgtcagaaaaaatattttcaatgtcttttacatcttctgcagaagcgttgttatgaaattgaacatcaataatcgtataattgttttgtcccgttaatgctgaaaaggtcttttctgaacagaaaatagtttctgttccgtctatacgggctaatgggctatttgctaaaatcccggcaacagtaacggtatgctccttgttgtcgatagaaagagtaatgttatcgccaacttgaatatctgtattttcggtttgcacaaatagcacttgattttcccgctgcataacggcatctatggaaccgtcaaccaaagtctcggcagcccattcaaattgattttcttcataggaaatcacatttgtgttataactcgctgcattacttattgccggaatatcataagcaaacatacgcccgtatgcccgtttaacggttttgttttgaacgacttcctctaacagggctttattaagggaacaggtatttgcttcacttgctatggataaatccggcgtccacaccggcggggtaaaggcatttttcataaagcccacaagggtactgaatgtcagaaacaatgtaatacatacagcaaatgctcctgtcatcagaatataattcttttttcttgcttttgcatgatgaacacccaatgctgtttcaatcctaattttttttgtgtttgccgcctttcggaaagaaacagtatgtcctgtatttccagatacagccgtaagcggagatactcttgcggctctttttgcaggagatcgcgctgccaataaaaccgtaactaaccctaatatagtgctaacgactatactaatccaactaattccaaaatggggcatataagaaaaccaattgggactaatcattcgcattacagcagataaaatccaaataacaaaaacagatgatacaagtcctaaggggattgccgctttgcaccaatagataccctcatatcggacaaagcgcatgatttgtttttttgtcgcacccaagcagcgaagcataccgaaaaattttgttcgctgtgagatattgctgttcagactgcttgaaatcattaaaatacaggtcagcataacaataaaggaaagcataagagcaacttgataaatttgatttacacttgtttttcccgcaatttgcccctgtatgctcaataaagataagttctctgttatttgctcgtcagatatattattttgtacttttatatccttaatggcgtttggtatattgctaagtcgcgaaaactgaatcatgtaattttctgtaacgtagctatctgaaaaagcagtaaggcttgaaagtccctctacggttattgcagcaatttgttccgttccagacatcatccttgctgcctgctcatcatctaaaaaaccgacaaccaagaaactcatgctttttccattcgggcataacaaattgattgtttcatttaatgaaagagaagcgctttttttaagtgaagaagaaactgcaatctcattttccttatttggatatttgccctctgcaaccttattcaaaaagatattctcaaacacactttcatcctgtgcgctgatagaaatattctttccatttatggaataccctgtgtcagcagaaatagtgttatgccagccggaaacttctacttctggacgggcagaaataaaagctgctgtttttgtatcagttgaagcaatctgataatgccagtttccgcttgtctgcatttccttttgagtaatcccttgtaagtacatatcagcaagaccaaacataaccgcaactaaaaataccgcaagcgtaatacagatacgggtcattttactatgcttgtgatgaacttttgcagatatgggaacaagtttaagataatttttcattcgttgtgcctcccaaatctgtaagcacaccgtcacttacgcgaaatactctgtcaacagaagccgttaagttatgattgtgtgtaatcattaaaattgtttgttggaagcgtctggaagcattgataagcatatccataacatcttggctatttttgctgtcaaggtttcctgtgggttcatcagctaaaatcagttttggttttgtaatcaaagctctgccaatggctactctttgctgctgtccgccggataactgactcggcaaatggtggcggcgttctgtaagaccaagtaaatccagaatttcctcaacttctgcggggtcgggtttacgataatctaacaataaagggaagataatattttgttctacattgagttctggaacgagttgaaatgattgaaatataaagcctatatttctacgtctaaaaatggttcttttttcctctttcatagaaaacaggttttgtccgtcaatcgagatagagccagatgttggtgtgtccaaagcgcctatacagttcaataaggtgctttttccagaaccggattctccaactacagcggcaaattcgccttttgcaagggaaaaggacacgtcctttaaggcgtctacctttgcttctcccttgccgtaagttttacataaattttctactcttaaaatttccatagtgcctataacctccttttttcctatgatagcaaggtcaacttacaacccggtgaatttaaccttacggttttgtaagaaaggaaagcgtaaatgtagtcccctcatggagagtgctttgtacagaaaccagtccgtcctgtccctctacaatagactttgcaagcggtaaacctaaaccaattccctgtgtgtccaaagaatgtttgctgcggtaaaaacgcttaaaaatgtggtgtatatcttctggggcaataccacttccattatcagaaatgcaaagccgcagcatattaggtgtattttcccatgagatacggataatcccacccgccatagtgtgatccaaagcatttttaacaagatttccaacagcttcacttgtccaatccatatcacaccaaatggattgttccaaatttccctctattacaatttgtttatcttcattttgggctcttgttgtaagctcgttgagggcagttttaataacttcgctcacacgacatagctttttctcaaaagagatatttcccgtatctaatcgtgtgatttttagcatggattgaatgagctgttctatacgctttaatgctgtatcaattttctttgaaaattcttttaccgtttctgcattatccggttcggattcaataatttcctgatacatagtaagggcagctaaaggggtttttagttgatgtgaaatgtcggaaattgtatttttcaaaaattcctttgttttgcattctgcttctgtttttgattgcagcatggtcgcaagttgttcaacagaagaaaatagccgatagatttctccctcactattttgtgataaatggttgaaataatctccgttaatataacagctcacaatattttgagcctgcaaataaagtctgtttcttacccaaagaaaaaacaaggtgcccgcgcacaaaagaaaaatcaataccatagtaccagttaacaagatacgaaaggtatgggattgaaactgcgaaagaaacggaagcaaactactaagtgtattagcactaattccaattttacttagtaactcaattccgtctttatcggtggttgtatttgaaatagcagttgcaattatttcttcggaaaccccttgttccaagagggaagatacaacagccgtatcgtgttctaaatacattgactttgttaccgatacttgactttgacagaagcatattactacacctatcatcaaagcggaatagacaataataaacagtaaataaccttttaaatgcttgtcacggaaaatagtcatacctccacctctttccattgataaccaaatcctcttacggttattaaatgctgcgggtgggaagcgtcagcttcaactttttcgcggagccgacgtatatagaccgacaatgtattatcatcaacaaaatttccggcgtcgtcccataaatcgtttagaataatttctctggaaacaattctatttgcgtttcttactaataagcagagcaggcggtattcagcacttgtcaagtctaaaacttttccattcaagagtacacgacttcccaacaagtcaatcaaaatatccccacattccaatatatttgttttatcctgtgctgatattcctgcccggcgcagcaaggcacggatgcgggaacataattcccccagtttaaaaggtttggtaacgtaatcatccccgccgcaatccaatccccgaattacatttacttcttcatcagaagcagtaagaaatataatcggtatctgtgtattctgcttccgcactctttcgcaaatttcaaaaccagttccatccggcaatgtaacatcaagaatgagcaaatcgtatttttcaatttgagttaaatgttgctttgcttcttcaacagtacggacaacatctatgtcaaaaccattctttttcagggagtagtttaatccgtcaattagacttatatcatcttccaatagtagcaatttattcatgttttagttcctttcctcgttttgtcctgccgtcaatcggctttttcgcaccctttggtatgagccaaacccggctaagatgtatcacaccgtcaattctattgtcagcacaaagcttctgaatccgccgttcggacagttcccatttctttgacgcttcttgtacggtcatatattcaaacataataaacctcccataaaatattcactatatattataggcgtttgaccgaatgatatcaatgcgttacttgtgaatattcctttatctgagatcgccacctgcggtgacggctgcgcgttctgcgaacgctgaaaaagtaaaaaagtaaagtccttaacataaaaaattctaatagtattcagaagccgagaagactgaatatagaaagtgaaatgatggagtaacaggaaatataaaaataattgaaaagtatattgacaaataggagtaaatatgctaatattataaacaaataatagacgagacaaaaacaaatagttctatagttaattcgtttggagtcagtttattatttcaaagatttgaagagcattgtatcatttataaaagattttgaaaagatattttatcagaggataaatcatagtttcaaaataaaatgtttataagtgtgaagatgcagattcaaattatagtttatgaaagggaggtacagaccaccaaagaattaaactatgagtgctgattcagattagcggacttgaggaaggcggatatcggaaagcagagtaccgtgagatggagattaaaagatcgaaacagtaacgggaaggtcatatgccggagggtaggatgccagaagagaaggttaagaaagatcagtaaaaaattaccacaccctgtatacaggagaaagaggtaagaatgattgaagaatcaaagtaaagatgggtatcaatgtaagattagttgatacccatctttactgttgtattttagaaggcgatccgaataatagagaaaggaaatgtatgagtattcaaaggtattatcatataaacactactatgcagattgatatataggcagtcatgaaactccctgcttttgcggaaagcagtcagaggcagagaggaatatgcagagaatctcgggaaagagcaagggcaacttccgccatcgcttcgggaaactgcgatgggcggccttgcagtcacaaggacggcaagaagatgggcagatgtctggcagaaaaaacttcaggccgaagcatagcatgctcagcctgaaggagaagcaggtagatgggctgccttattattttgcagccttatcagcaaaatctgttgtcacaaggtctttatacggcgcgcgtttatccagttcgccggcgtcttccaggatatcctgcagaaggttgaaactgtcttcttcaaataccagattgtctttccaggtatcctgatcgtagtaacgttccacaatcatagtaatcgtgtccagatcggtctctttgaactgaggggctataatgccggcaatatcttccggcgtgtgggactggacataatccatgcctttctgcagcgcattggtaaatccctggatgactttggggttcttgtcaatataactctgctttgcggagaatgcagtgtatggcacataaccgctgtctgttccgagagaggcaacaacatagcctttgccttctttttcaaggttggtggcgcctggctcgaattcaaccgtaaagtcagcctgcccttccgagaatgcggcagcagtagagccgaagtcgatactctggtcgatatttacatcctttgcagggtcgatattgttctggttaaggatgtattcaaataccatctcaggcatgccgcctttgcggccgccaagcacatctttatctttgatatcttcccaggtgaagtcaggcatctcttcccgggctactaggaagttgccggcccgctgggtcagctgggcgaagttgacgacgtagtcgttggcgccctcgttgtaggtgtagatggatgcttcagatcccatgaagccgatgtctgcgctgcctgaaaggactgcggtcatggtcttgtcggcgccaaatcctgtaaccagatccaggtcgatcccctcatccgcaaaatatcctgcctcaatggctacatacatcggtgcatagaagatagagtgggccacttcatttaagatgacctttgttggctccttctttgtctcttctttctttgctttcgtatctgaagatgcggtttctgcgtcatttttggatgagcaggcaagaagagaggtcattgccatggcaacgacgagtgatacagcaatgaatcgctttttcatataatcctccttaaaattctaatgctatagtatattcggcaaagaaggatttgttaccatccgtatgggttagcagattacgatgatttttcgaggcgtggtctgcggcggaatacttctggttgtcgtggaatagtatacgattagcagttttcctccaagagagcattcgaagggctggccattggaagtcacgactggcgtgtaacgctccaaattcaatttaagagacccatccagggcttctagattatcatcgaagtagcctgcatacatggtctcatacggattgcggcgtccgataaagactgcctggtattgtggtggaaatatgagtggtatgggaaggttggcatcatagaaggcggccacattcatgccgggccgcagacgtacttcattgatgacgtacgtatccggcccgacaataaagttgctgatcccatcagaattgcgtatgctgacctgccgctggcagcagtcatcgccaaatgctgtgatgtcctggattactcctgtaattggaactagattcatggaaggcataattaatcccccgtttttgattaatatatgccgggattatttggattgttcttctggcttgatattggctaccttggcattgggaggaaggaaatggtacagatcctcatatgactcaagttcttcgatggagatgggctcggaagggataagtccggtacagtcctgcttggaagccgcattggacaagtagtcataatcatcaatagttttctggtttttctcatctttcataagtatattacctccggttctttgcaaaaatataaaaagattaacattagattgtgtagaaaaagagaagggtatactgtataatatttccatgagtgtttagattgaagaaagaaggtcctattatgaacattgaaattgacacgcatacccatacgctggccagcggccatgcatataataccctcagggagatggcggccatggctgccgaaaaaggacttaaaggactggctatcaccgaacattctccaaagatgcctggaacttgccatatcttctactttcagaaccttagagtggttccaagaaccatgtacggcatcgaactgctgatgggcacggagttgaatattatgaacgagcaaggagaagtagacctgccgcagactctattaaaggaaatggatatagccattgccagcatgcatacaccctgctatgagggagagaagaccacggagaagattacgcaggcatatttgaaggtaatggaaaatgaatatgtagatattatcggacatccggatgatggaagattcccggcagactacaaggaactggcgaaggccgccaaaaggacgcatacgctgctggaagttaacaattcctcgctccgtcctactggcttcagggtgaatacccaggagaactgcctgaagatgttaaaagcatgcaaagaagaaggagccatgatcgtgcttggaagcgattctcatgtggatgtggatattgctaattgccagtatgccgcagaattggtaaagaaagcggattttccagaagaattagtggctaattccagtctggaaaaattgaaggcttctttaaaacggaataaaaaggtatagactttacaaatttagtgtgttaaaatgtaacagtaatgaaatttgttacaaaggagataatattatgagtaaaaagattaggactgaggcagtagattatctgtttagtgctatattaagtctgaaagataaagaagaatgctatactttttttgaggatatctgtacgattaatgaattgttgtcattgtcccagagatttgaagtggcaaagatgctgagagaacataagacataccttgagattgcggagaagacaggtgcatcaacagcgaccataagtcgtgtaaatcgttcgttaaattacggaaatgacggatatgacatggtattcgaaagaatcaagacaaaagaggaagaataaagaagaaataaggctgactggccttatttcttctttttatcctgaatcggctcaggaagatcatcaattaacttttcaatcagcagtttctttacgtatacgtcgaaactcaggctgcaaatgaatgcgaagaactgcaaataatcttgctctgcgtcaggggcatctgcaaaactgttaagcgccgcattgtaggacttggcaacatccttctgcaagttctcaatccgggatttctccagtttgcagatctcttcatagatagaagtaatattgaagtccttgtgattatcgaaatgtttttctgtgatcggcgctaaaagcgtctcgatatccttgatggaaagaatatttttaaaatagtatatgaatatcatgaccaggacatgctctttggaatacttcttcttaaccggaggcggcagaagattattttttgcgtaattgttgatcatcgtcttagtcagaatcttatcgtccttatgtcttttggtagactgaagctgttcctccataaaggtagttacctgatccatgtatagatctatattcgggatattctccggtctcacgtaatcgattcgcgagatgctgaatagaatgctgttcagcatatcttttgtgtcaattgtcatgttaatcacctcaatatagatattatatagtattaaaaactagatgacaagggctttttgtctctaagacagtttttaccagtacatttttaatcggcttgattttagcgaccaatgttgatattccaattttcatggtttataatagataaatctcaacccggcaagcagcagtttgacggaactgtcaagattttggaagcaggtagagcctatgatggaactatgtcataagaaaagtcaggaggaaatgaaagtatgagcgtatattcaatatattttagccctacaggaggcacggaaaaagtaatggatattcttgcagatgtatggaaagtggatgcgcagattgatctgtccgtattagaagatgattatgagaactatcagtttaatcaagaagacatctgcctattcggcgttccgtcctatggaggaagggttccggatgcggcgcttgcccgtattcggaagatgaaggcaggaaatgcctcggcagtcatggtggtggcatacgggaatcgcgcctatgatgatacgctattggaacttaaaaatgaactttgtgaatgcgggtaccgggtaaaggccgccattgccgcagttacagagcactctattatgaggcagtttgcaagtggacggccggatcagcaggatgtaaaggaattaagggagtacgcccgcaagattcaggattctatggctaagcctggggatggggaattgaaagtgcctggaaaaatgccttacagggaatataatggggtaccctttaagccaaaagcaaggagcaagtgcaccagctgcggcaaatgcgcggcggaatgtccggtaggggcaatcccgaaggatgcgccgtcaacggtagatgataagaagtgcatctcctgcatgcgctgcgtggcgatctgcccctatggggcaaggacgcttggaaaggtaatgctgcttgctgcgtctcaaaagatgaagaaagcatgcagcggccataaggagaatgagttgttcttaccttagaaagttcaagaagggaaatgttagagatgttaaaagcagtgtcagctgcacgatctgtgccgtcgcttctgggttcatgccccggcattcgacgacactgccggaaaaattggattatatagacaaagatgcagagtaagatttgtgaaatatgcacatatatagcagagggaaactttggttactttataacttaaaaagccatttagaacatgatataatgatttagaaatatggttgtagttttttcgtgaagaccatgcacgaaaaagccgcagcctttttttgttgtcttgtacttgaaggggccttgcgacgattatcgtccagatcgtatcggcattgcttgcctcatactatctgtttcacaccaaatcttttcgcttaagatcattaatatatttggaagtgaagatgggctgtacaatgaattagccgtactgtctttttgaatattcttaagtatgatagccctgtgctgcgttcaggatgctgcgaaaagaagaattcgggaaagagaagacagtacttgtggaggcaacattgcagcatagttaaagcggatgatagaaaaagacccggcagcatgttgggctgccaggccttttcgtgagggggattatccttcaatcgcaatatacttattattttcgattgccttcatatcttcactctttggcacggaaagtttcaagattccattttcaaatctagccttgatgttgctttcctctacattctcaccgacgtagaagctccggctgcaagagccatagtagcgttcacggcggatgtacttgccgtctttatctttttcatccgtattcttatctgtcgttgcgctgatggtcatatagccatctttaagttctgccttgatatcctttttgtcaaagcccggcatatcaatgtccaactcgtaatggtccccggcatcctttacgtctgtcttcattacactactggatgcatgcctgcggaatggaaaatccataaagtcttcaaataaactatctccaaaaatactaggcatcaacataagtcatctctccttttctatgtgaatgctgtttgttttacttgttctacaagtaatataacagatataattagcactgtcaatagatgagtgctaattttttaaaaagcgggcgacaaaatttgccatcaaatatctgccttgcacttcttctccaaagaacttataatagaaacagactttttggcggaggtaaaaacatatatgaaatctaccgtattatgttataatttgaaaggcacgaaaaagggaaagcagattgccatgatctttgggtttcttggatataagatacgccatgtggataaagaagagtatgaggttcccataggcgtactggcggggtcaagcagtcaggagcaggagactgcgcaatatgaaggagaaggttttccggaagagatgctggtcatgcatgccgcgacagaggacatgctagacaaggcattattcctgatgaagaaggagaaggtacaggttggactgaaagccatggtgactgagaccaaccaggaatggacgtctcttgcgcttcatgatgagatacagaaagagcatgagtatatgaaacagaggaaggaagaaaggaaacaggaagattgagtatatacgatacattgaatgaacagcagaaagaggcggtgcttcatacagaaggcccgcttctgatacttgccggggcaggctcgggaaagaccagagtgctgacccacagaatcgcatatttgatagaagagcagggagtaaatccctggaatatattggctataacctttaccaacaaggcggcaggcgagatgagggagcgtgtggacaaactggtaggattcggcgcggagagcatctgggtaagcacgttccattccacttgcgtgcggatcctccgaagacatatcgatctgctgggctatgataataactttaccatttatgacagcgatgaccagaagacgctgatgaaagacgtatgcaagttgcttcagattgatacgaagatttttaaggaaagagctttgcttagcaccatctctcatgccaaggatgaactgattacgccggaagaatttcgaatccgtgcagaaggcgatttcagccagaagaagatcgctgaggtgtatgaggaatatgagaagcagttgagggccaacaatgccctggattttgatgaccttcttgttaagacggtccaactcttccagacgcaggcagatatgctggaatattaccaggaacgtttccgttatatcatggtggatgagtatcaggatacgaatacggtccagtttgaactgatccggctgctggcttcgaagtaccgcaacctgtgcgtagtaggcgatgacgaccagtctatctataagttccggggagccaatatcaagaatatcctgaattttgagcatgtgttcgaggatgctaaagtgatcaagctggagcagaactatcgctctaccagcaacattctgaatgctgccaacgcggtcatccgcaataaccgcgggcgtaaggataagaccttgtggacggacaacggggacggcgagaagctggaattccgccagttcgatacggcatacgacgaggcggaatatatcgtgggagatatccgggagcatgtggaccggggcgaatgtacatacaatgacaatgctatcttatacaggacaaacgcgcagtcccgtatctttgaagaaaagttcgtgaacgctaatattccttacaagatcgtgggcggcatcaatttctacgcaagaagagagatcaaagacctgctgtcctatctgaagacggtagataacggccaggatgacctggcggtgcgccgtattatcaacgtacccaagaggggaatcggacttaccagcattaaccgggtgcaggaatacgccgtccggcatgaggtgggattctatgaggctctgcgggccgtggatctgattcccaacattggcagaggggcgtcaaaactggaatccttcgtggcgctgattgagcattttaagacggatgcgcaggagatgagcatttccagactgatgaaagagattattgaagagaccggctatgtagagagccttgaggctgaagacagcgaagaagcagaggcaaggatcgagaatatcgacgagttgatgagtaagatcgtggcctatgaggatacctgtgaggaaatgaatgaaccgtccactttgagcggattcctggaggaggttgccctggtggcggatattgacagcctggatgaaaatagcgactatgtggtgctgatgaccctgcacagcgcaaaagggctggagttcccgcatgtatatctggcagggctggaagacggaatattcccaagttatatgaccattacggcagatgacccggaagaagtggaagaggagcgaagactctgctatgtgggaataaccagggcagagaaggcgctgacgcttacctgcgcaaggcgccggatgatccggggagagacgcagtataacaagatgtcccgtttcctaaaagaaatacccatggaactattgtccacaggggcggtctttgagaaggaaaaagaagaacccgccaagcaggcagcgtatatgcaggccaggcaggcatttcggacgaaggcatttacagcacctaagccggccagacagtttggcactccggccggggacggaccagggtatggcgtaggcgaccgagtgcggcatatgaagttcggggaaggaacggtaacggcgattgtggaaggcggaagagattatgaagtgacggttgatttcgacgggccggggacgaagaagatgtttgcgacatttgcaagattacagaaagtatagatataaaagacgaaggcggtgccgctctggaggagacggcatcgctttcttgtgtcaataatgtatccatggtttctgaacagctgccggctgttatcagaaccctcagcctacggtacagtctgccggatgacctccgacacaggcttcctgaagatggtataactggctgaatgcctcggaattcagcagttgggtatagttgatggctcagcgacttcagcattcccatttcttttgcgcaggaagtgcaggaagcattccacacatttataacggttagttctgattgtgtgaaaaggcccttggagtccatctcatatccgctcaaagtctttaattttatgttgtcagagtctttttcctgtgtctgctgccgtgtgtcattttttgcggcttcattcttcgcagcgttatttgccggtgctttttagtgtcggtgccagttttcgcactgcaggcagcagtgaagattatcgtcgccatgaaaagaggaaaaagcatccttttcgttaaaaaaaggttacagccatactgtaataatagaagttacagaatgagatgtcaataggtttttgagaaagtatgtgtcggataaaaattattgattttggcataaatatatagtaatctcaaaatgatagtgttataataaatacaatatttgaacttgctatgatagcagaaaggatgtgggagcatgagtaaagtagaggatatcattgcagcaacaaaattaagcgagctggtgaataaaaaggaagaagacagccattgtaagactgttctttggattttggcaatcgtaggagcagttgctggaattgcagcgattgcttacgccgtatattgtttctttacaccggattatctggaagactttgaagaagactttgaagatgatttcgacgatgattttttcaatgatgatgatcaggtataagggttaacggaatagcctgagaacgcaatagaggaagcaggttggaagcctaactggtgttagaagggcctcttgcctgcttttatcttggaaggagaaaaagatggacgagcaatgttatgcactattgatagatgcggacaacgtatctgccaagtatatcaagcctatattgacagagttgtctaaatatggggttatcacatacaaaaggatatatggagactggacgagcacgcagaattccagctggaaggaagaactgctgaccaattccataacgccaattcagcagttcagttatacccaggggaaaaatgcgacagattctgccatgattatagatgccatggatattttgtacacgaatgatgtggatggattctgcatcgtgtccagtgacagcgactttaccaggctggtaagccgcatcagggagagcggaaagatggtgatcggcatgggtgagaacaagacgccggagccattcagaaaggcatgtgataaatttacaattcttgagaacctgttaaatgagcaggagccgggaagcccgaagaccgaggatacccaggatacgctgggccgggagaagatcgagatcgaagacgcgatcatcaagatgatcattgagaaccaggacagcaataaggctacgggcctgggcgaggtaggaagccgcctggttagcctgtatccagactttgacgttcgtagttatggctataacatgctgtcaaaattcctggaggaattcaccagaattcagctggtcaagcatggaaatatcgtgtccgtagccttgcgggaagactggggtatgaaagaagacattgacggatatgtggtttatattgtgaagaaggctggaaaagacggcatagaactcagcacccttggaaataaagtgtatgaaaaatataaggattttaagatcagcgattatggatatgcccagttgaatcagtatgttaagagcatagaacatattaaggtggaacaggtcggcaccatattgaaagcaaaatatatcaagtaaggatagaggagaattacggcatgaaaaaagggcaggtatacgaaggaatcattgaatcagtagactttccaaataaggggaaggtattcctacctgaagaagaaagatatgtaattgtgaaaaatggaattccgggtcagaaggtccgtttttccgtcaataagataagaaaaggaaaggcagaaggaaggctgctggaagtgctggagccttcaccttcggagattgctccctcctgtcctcattttggacaatgcgggggatgcacttatcagaatcttccctatgaagagcagcttaagatgaaagaagcacaggtgaaggctatgatggatgaggcagttgagggagattactgctgggaaggaatcatgccgagccctgtaaaggaggcctaccgcaataagatggaattctcgtttggcgatgagtataaggatgggccgctggctttgggaatgcataaaagaggcagtttccatgatattgtgaatgtaatggaatgccgaatcgtagatgaagactatcggaaaatattggcatgtaccctgggttttgccagagagacggggcttccttactaccatcgtatgcgccatataggatatttccgtcatctgctggtcagaaaggccgtaaagaccggggagatcctgatcgatatcgtgacaacgacagaacataactttattgaagaagcaggtggaaatcagtgggtcagccaactgctttctcttgaactggacggaaagatcgccggcatactgcatacgatgaacgatagcctagcggacgtggtaaaggatgatgggaccgagattctttacgggcaggactttttctatgaagaactgctgggactgaaattcaagattacgccattttccttcttccagaccaattcccttggggcggaggttctatatgagaagaccagggagtatatcggagagaccaaagacaaggttctctttgatctgtacagcgggacaggtaccattgcccagatcgtggctcctgtggcaaagaaggtcgtaggcgtggagattgtcgaggaggcggtggaggctgcaagggaaaatgcggcgctaaatggcctggataattgtaccttctgggcaggagacgttttgaaggtcatcgacgaactgggcgaggtgccggatgttattatccttgacccgccaagagacggcgtacatcccaaggcgcttgagaaaattaccaactttggcgtggagcggatggtgtatattgcatgcaagcctaccagtctggccagggatctggagatgctacaggggaggggataccgggtggaacggatgggatgcgtggatctctttcccgggacagtgcatgtggagacggtcgtactgctttcccacaaaaaacccgacagtcatatcaatgtaaaggtcgagtttggcgagggagagggcaaagttccgttaaaggcaatctccgaaagagcagaagcctacaagccgaaagagcgagttacatacaagatgattaaggagtacatagaagtgaaatatggcttcaaggtacataccgcacatatcgcagaggtaaggagggatttgggcttgccgatgtatgacgctcctaatgcagtagaagaattaaaacatccgaggaatccgaggaaacatccgacagcggagaaggtggaagcaatacaggatgctttgaagcattttcatgctatttagcggaaggaagactgctgaaatgagaaaatttatattgattaattctcctattttttgggattctgttaaagaaaaagagcaatatttatctcctttagggttagggtatatagcaacatatttagaaaagattaacaatatctctgttgaaattgtagattgcgtaaaagaaagaagatctgtttcggacgtaatttcctatattaataagacaaagccagattatatgggtatcaatatttttactcagaattatgagatggtcaaaaagattgttgaaactattagtgtaaaatgcagctgttttgtaggaggacaggctgtcaaaagtatatataataaaattctcgattggaaagtttctaatacattaaatattattattggtgaaggcgagtttattatgccgcagattgttttgggaaaatgtagccagaagccagaaatacagagggactccaaattcgtttatagagtaaataaagattcaatatattttccaaaggatatttcaaatatttttttgaatagaaaatatctaggtaatgaaatagtcgttaaccattatggggaaaaagaaatcgcaattataacatcaagagggtgtatgtttgattgtgcgttttgcggtggagcaaaaagcttaaataaggatgtaacaataagaattcgaacagaagaaagtgttgtaaaggagcttaacgaaatattgtctacatatccagatatagaaagtgttcgtattttggatgatttgtttttacgtagtggtaatagtatagatatggcaaataatattttttctcaattttcgcagttgagttggagaggaatggtacacgtattatcattggtaaaggtaattgaaaaaataagagaacttcggattggagggtgtaaagaactatttattgggattgaatctggttctgagtcaataagaaaaagaataaacaaaatgggaagtccaaatgatatattaaaagtttcacaggcgattttgcaaaatggaattgatttaaaaggttattttatatatggttttcccaaagagacgaaggccgattttcaaaagacatttgaattggctaaaagattaaaggaaatctcgttgagaactgctggaacatttagaacaagtgtatttcaatttagaccttatgacggtacgcagttatataatgaaattgtgaaagatacaggtataatccaagactgccagtttaataattcaataagccaatttggaggaagagctcagtttaattttgattttggaaattatagtatggaatctaaggaattattaaatgagtatataataaaaacacaagaactgtcaggagaaaaataatgattgaacaaatacgagaatgccaaaaatgtaatttgtgcattaatcagaaaccactactggatacagaaaaagaatgtcaaattttttgggttggcttatcagctaagaagatgttgacggatggtgaattaccattatcacctgcaacgaacactggaatgataatccataaaatagaagaaaaatgtaataatgttattgcctataagactaatttggttaaatgtttgccactaacagagcaggaaaagattcgctatccaaacataaatgaaatcgattgttgctttgagcatttgttacatgaaatacaaataatgtctccgcaaattgtgtttttattaggagaaaaggtatattctactgtagaaagaaaaatgcaaatcaaatttaagaagtggaaggattttgattattattataaaaaaattgatgggatttattacgttcctatacatcatccttcatatatatatgtgtataaaaggaaaatgatacaaaattatatcaatagtatagaaaatgttattaaccaattattataatatttaagaggattaaaaatatgatcttgaaatggatttaaagataaggaaggattcaaatggatatacacattttgattttagctgttgtattatttattgttttttgtattgtctgggaaaatgaattgataaagagtttgttttttacagtttcttttataattacattatgggtaaatattccatgttttgttaatatatcctatttagaaaaatctaataatttttttatgttgccttttaagttatacgctgaatgggatatcttttacataatatgtgcaaacatactattagggattatactatttttacaatctaaatttacaaataaagtagaatatacttatagagaaataaaaaggatatacgataattttggtaatgatgcagtggaattatatattattggtaaagatttagattttttatatagaccaaaatttgaaaaacagactaatagaattctacacttaaaaaataattgtaaattattgtgtgaactaacaacagatgaaaatttattgaatttgtataaaaagatttccagagaaggagtagacatcaaattttatacacagaacgacaacataacaaatttgaaaggacaaattaagatcgatcaaaatggaaataaaaaagcaatatttacttcaaaatcaggtgaaaagtatcagttgttaaatactgagaaccaatttcttgtttcaactattttagaacgatgtaataaagtatataagaaattggatggttaataaaaagaaaatatcaaatataagcggatcatatgataaagcatatctaatttttgtgggaaaagggatgcatgagcagtattagtattgtataaatattgcccatatttctgtgaatttgtggggatatgttttaatttgatactcatgtggagacggtagtactcctttcccacaaaaagccagacagtcatatcaacgtaaaagtggagtttggcgagggcgagggcaaagttcctttaaaggcaatctctgaaagggcagaagcctataagccgaaagagcgagttacctataaaatgataaaggagtacatagaggcgaaatacggcttcaaagtacatactgcatatatcgcagaggttaagagagatttaggtttaccgatgcatgatgctcccaatgcggtagaagaattaaaaaatccgagaaaacatccaacagcggaaaaagtagaagcaatcaaagatgctttgaagcactttgaggtaatctaaacagataagcgtatcgttagaaatagtggtacgcttattttttcgctcaaatttgcacctttgaatgaaaatcctaatcccccagctatgctggggagaatggagtaagcagaagcgtgtatgatatcaataaaaaacctcctatgatacaatgagaatggtatcgcaagccaaactcaaacataggaggtggtccttatggacaataaaagtttatcacacacaagatggaaatgccagtaccatgtagtttttatacctaagtatcgcaagaaagtgttatatgggaaattgaaagttgatgtacgagaaatacttagcatcttatgccgctataaaaatgtggaaatagtagcaggagcagtatgcgatgattgttttttgcaagcactttttggagaaaaatgcaaaatatttttggagaatgttgcatctccaaattggagaaagttgcaaggcctcggctggcagctattctgccagctacatagccattgcagaccatatttagttgttatagcgtgagatatggaaacggaagttccgagttttcatcttcatgtgcatgttccctgaaatagcggaactcctcatccagctctttataatggataaaatcatttagatatctcagatcttcttctgcgcatcggtgatcttctatgagatcaagaagataatcattcatctcctcatagcgttcctgaaggttttgatattttttctgttctttgataacttttttatttttagccattgttacctgcctcctgactgctgattcttgaaagagttgcattgatgcttgattcacgtaaccgattattgatccccgggaacagaatcagttccacatggtgggtgagcctgccaatcagtgctgttgtcatccgttggtcataaagaacgttcacccactgtgagaattcaagattcgtgtttaaaatcaccgatttctgctcgtgtatctcagaaagataatcaaacagaagctgtgaaccggtgcggtcatacggaacatatccgaattcatccagaatcagtatccgggcactgttaagcttctttttcagtgcagtaagctttccgctgctctgactctcggaaaagagattgataagtccggcagtgcggtagaatcttaccggaatttcctgattacatgcagacattccaatcagaatggaaagcattgttttaccggttcctgttcctccatacatgatgacattttttcctgtatgataaaactccaggtctaacaggctttggaagctgacgtcttccgggaaatctatctcatctgccctgaattcctccacgcggtatctacgtgggaagccggcggtattgaggaacttgctcttcctttttgctgtacggtattcaatttcgtttgtcaggaggtttaaaaggtattcctgcggtgtgtctcctttctgctcgaaagcctgccctgcaaagttcgtggacagcttgagctgtttgcagcatgctgcaatggatttttctatatcagccatttgagacacctcccttcttaagggcggcatccagcattttcagatcatttctgaacggaatgaccttctgctgtggcagtaaaactttgttttcaagcggaggcagaagcggtacatctgcataggttcgcctgtaaaggctctgcagactgtccggatctgtggcattcagccggactgcttcgtcaactgttctgacagcactagcaaacccggttctttccgtaagttctgcaagcaccttcaggacacgtccgcgttccttgctttcgcagttatccatgtatatctgcatggtttgtggcatcatgtcatatatgccgctgtttcgaagagaacggggtttcctggcgatatatgtaaggtatggcagccagtccattctttcatgttcattgccgtaaaggcgcttatgacgcaccacttcgtgcatatctttgtccatgacaatcacatcagaggatgtaatcttgagatttacaatggactcacagaaagccggtgaagcagaataacggtgctttcctgcgtcaagagtaaactttccatatttatccgttgttgccgttgtgtaaagtgccgtatcaaacggaacggaaggaagcggcagtaaacgagccttatcttcttcaaacagtttactgataaagcggtcatcatcgtcatcatagtgctcacgctgcatatcgatttcacaacgatccagaagatgcttgttttctttcacaagatcatcaaagcggggtaccggtacaagttcgttgcggcgcaggtagccaaccttgttttccacgtttcctttttcccatccggattcaggattcataaaaaccggcttaatgcggtagtgttcacaaaagcgttgaaaccgctctgttacattacgcccgccacctttgatgatttcggtaacaatggttctggtattgtcaaaccagatttccgtgggaacaccaccgatgtgctcaaatatggcaaccagtccttccagaagacattccatgttttcgccataattaagctggaggaaacctccgttactgtagggaaaactgagcacaaggtacttagcctcgtgatgaagcctgtcattttcataaaaatcggctgttccaaagtctgactgggcttcgccgggatgatgattaagagggatatagccatcggttctttttagccgtagttcctctttcttctgtttgacgtataaggcaacaagccgataactgcagccgaaaccatctgcttcatccttgaggcgtttaaatactcttttggctgtatgccgttgctttcttggtgcaagcttgtctgcctgcagccattcatcaatcaaaggtttgaatgggtcaagcttggattcgtgaacctctgatgatgcaggtttgggagatggattgttaaagtcctccatatccacatattttttgaccgttttccagttaaggccggtctcagatgcgatttcagaaatgttcttatcttgccggtagaacatatctctgatatgatgtatctgatccattgtagttgacattctcctttcctccttgtctttattgtttggactacaataaagataaggttaatggtttttggatatacctgcaatggatcttttcatgggaatgctcatacttggtggctgccactcaagcgctacaccgttcctgagcgcttctagcgaatgccttgcaactttctccaatttggagatgcaacattctccaattcccgtttgcaactttcggtaattctattttacaataaacagcgatgatcatgtacatttaagtgtagcgattccacctaaaatcagtatatcagatttcatgggatatttgaaaggaaaaagtacattaatgctatatgataggcatcccgaattacaaagtaagtgggataaggcattttgggcaagagggtattacgtagaaacaattggtaatattacagacgaagcagtacagaagtatattaaagagcaagcagaggattcaagaaaagaagattcaagaggtgccgctttatagcggaccagtaaaagtgcttgcgataccgcccttcggggcgagcagtaacaatagccctttggagggctaaggctaaaccaccacttgaagtggtggttgtaacttgatatatgtcctcatagaaaaagatggtaaacggaaagcagaactactacaagcgttgtatgatgaaataagcactaatgtagttccaatcaggccagacagacattatcaccgaaccaaggggcaacttgcagcaaatttttcaaatacacataagagaagtttctagacttaaaatatttttttgctccagggtgagttgtgtccttttggattaaaattctttcaaaataagaataaaggatacacccttattaaaaagagtatgtcctaaatactaagttaatgacattgagtatttacaagggagcaaggcgctttccagggtgtggagcgccccacatttctaccggattgcagagaagttttccaccatcattccgtaggtttgaacgctttaggctgttcgatttcaagaccggacatgagccagtcgaattgctgccaggtcagttgttttacttccaactgatttctcggccaccggaatctgccctgaacttccatgcgtttatacaacagcacaaatccatcggattcccagagtaaagctttgatcctgtcacaacgtcttccgcagaaaagatacagggcactccgtcttggatccatgtgaagttgctcctctacaatggaacacagtccgtcaatggatttccgcatatccgttctgcctgttacgatatagatttcatcggcgaccgtgatatcccctaacattccagctccttcacaatgcgaagtgtctgagccagaagctgtggatctgttccattcgggatagtcagaagaaaccttccaacagacagcttcataggtgctgcctcagaaatgctgcttctttccatagacgcaggaatcatatccaatggctgttcatatgagatggtgtcaggattatgaaaatctaccctgacgacctcctggctttccggagtgttatagctgcgtccggttgccgctggtaaatccatgcaacctttttgccgtagtcgctttacccagttataaaaggttccaggcttgatgtcgtgttccgcacaccattgatgatctgtcaatccactttgacggcattccatgatgagacggtattgttcttcagcaggtattcttttgcttctcatgagcagtcctccataaatcgaatagagtaaaatgctcgcatctatcatttctagcaacagaagatgaagtaaaatgcttgcattctctattaatcattatggactgagttttagggcaacgcaatccgtcgaattattttgcgcttaccctaaaaccttgatacagcaaataccctcaacggcttcaccgtagcaagagtttgtgttttcaacgggttcctgtgcttcacaactgcaggagcaacaacaggatttcttttcttcctttttctttccaaaattaaatagtgccataatgacaacctcctatatttttataaaattaagccttgaatcgcattaaagaaatagccaacgataataattccggcagcgcagatgccgataaagataccgagcagtttcggcttgattgcctttttcagcataatcattgacgggatggacaatgttgtgacacccatcataaaagcaaggacaacaccgagatttgcgccctttgccaagagtgcttctgcaatcgggattgtaccgaagatgtcagcgtacatcgggataccgacaatggttgcaataataacaccaaaaggattgcctgtgccgagaattttgactatcaaatcttcgggtatccagttatggataaatgcaccgatccagaagagcgaaaacaaccgtttcagccgagcagaccttgaaagcaagctgctaatggtggatgacgacatggacatgagcgccttcgtctatgaagcttaagaatgctggtgtggatggatatcctctgtccatgacaactaaatatggatatctgtcacctatagtatcctttattccctttagctgttcctgggctactcgcatttcatcaaatttaacagtattaatactactttccagtataaagcgattgagaacatcataaatacatcctaatctaatctgagcacatggttttcctccccttaccgaagcactgccatatttttctacagtttcgttagtggttggaatatttatatctgatccatcggccgcaagaactaaaaagcctttgtaggtatatggctcgatttctaaatcttgataaaagtttttattgtgctcttgataaagatacttaaaggcgtctggattggatgagaaaggaaaaacgctgatttcagcaaagggaaagacggttttgaagccctcttatagtgtgttgcaggatgattttttccatgcgatgcgtgctgccggatacaccgatgtggaacgtggggagcgtggcagtaccgaggagcatttgaccgtgacacagtttaaggtagcacaggagcaacagcgattggaagatatcactgcacaggtggagaaatcccagcagacattagcaaaagcggatgccgccaaagagaaaaaagaaaaagaattatcggctcttgaagaaaagactaaggtagcaaagcaagaagccttgataatcatggaaattgaatccatgggaaagaaaacacttaccggaaatattactatgacacaggcggagtgccgcacactaaaagagtatgcagtcagtagctttgcagaaaaagcagagaaactgaaatacaagcaacaatatgagcaggcaacaaaagaagcccatatttggaaaaagaaatatatcaatctgaaagaaaaagcccagccttatctggatgcactggaaattgcatcggaaaaggttcgggcttttctttctgtcatcctcgcaagaggaaaaatggaacctgaaagaaaacagccaacccatagtcgtaaaagagatatggaaatttaatggaggaattgcctattgagtaaatattatgatgatgcaagatataatgcggcatttgaccgttgtgtggatgtaatgacccgattgattcagaaatacggtcatcaggtcttagaggaagaggatgttcagacaatgacagagcatcagggagaggagaagcagtcgattattgataaggctgcttaaaagttggattacacgttgcgtatttacaaaaagccatgctataatgaatacgcaacgtggtattttttcgttgtggggaatttgacgaaactaattattaaaaaaattaacctaaattggaggtatattttatgaatacgatggataatatcgagcttattaaacaagcgtactctcttataaagaatgaatacacttttcataaaagtacgatgtatttacaaaattcgatttgggatggagtatctggagatgaccatctcaaattagattataagttaaaagctattcgacaggattttgctaaaatattggttataatgaactccatcaatacaacatatttgaaatatcagcaggatgaatttgatgcatcttatttttcgatgatgagtgagcaagcaacagaagaattagggtgctttattgaatacttatttgcaaaatatcgtgttttattagaatatattcagcaaattatggaaatttgtattccacctcaattcaatgatactcagaaaaatgagtatatcaagctaaagaaagcccacactaaatataaatttttgttaaaatatgtagctgaaaatattgaagattcaagtggtgtgttaaatatggagtggtttcaaaatattcggatagatagagattttataattcatgatggtgctacttgccttgtttttggggataaagagaatttattatttaaggtcatgactacagacgcattggataaagaagatgtcgaacctgacatgttttatttaaatgctaacggattaatttactatgtacgttattggggtctgcagatttcgaaattaattatttttgctgaaatgataatgcaatttttaatcaaaattggtaatatgcctgtgggtaaaaaggaacaaatagattggagtttgtcaaaaggcagaaatagatttatcgatagtgacggaacagaactcaatgataaacaggatgttttagatgaaatgctgaaaaacttaatcagtatggaaattttgtcctgaaattcgaatttacaggatataggaaaaggaaacatttaagcaagtataagactctcccataaggaggaaatgtaggagaaaaatggattgcaaaacgaaaattaaagaattaagagaattgacgggtatgaaccgtaaagaattttgtgaatattttcagattccgtatagaacggtcacagagtgggaattggataatcgtcatgcaccagaatatgtcttacggttgttagaatattatatccacatggaaaatattacaaagaaatcaaaagaggaaatagaaaaagaggatatttgaaatacataatgaggaggatgaaatggctaagaaaacggtaaaggaaacgattcatgccaaaggaatagacattggcatttatacatctgattttcaaaatgaatacatttcattgacggatattgcaaaatatcgtaatgaagatgaccctcgttttgtaattcagaactggatgcgtaatcgaaatacagttgaatttcttgcagtatgggaagaattacacaatccggattttaaccgtgtgcaattcgaggcggttagaagtgaagcagggttaaatcgctttgttatgacacctacaaaatggattgaaacaacaaatgctataggaattgtatcgaaagcaggacgttatggtggtacatatgctcatagtgatatagcaatggcttttgcaacatggatttcaccagagtttcagttgtatattatgaaggactatcggcgactgaaagaagatgaaaatagccgtttgtcattgaattggaatcttaatcgtgaaattgcaaaaattaactatcgtattcatacagatgccataaaggaaaatttggttccaccagagcttacaccagaacagatttcttatacctatgccagtgaagctgatttgctgaatgtggcattgtttggtaaaagagcaaagcaatggcgtaacgagaatccggaaaagaaaggtaatattcgtgacgaagcaaacttgaatcagttattagtattggcaaatatggaaagttataatgctattctgattgaacagggaaaaatacaatcagaaagattgattcttttgagagaattggcgattaagcagatgcagaccttgtctgcaatcaataatacagcattggcaagattaccgggaggagatgtggattgaaaagaaatgtaaaatgttatatttatacccgtgtttctactgctgtacaagtagatggatacagtttagatgcccaacgtgataagctacggaagtatgctgcatacgaagatatgattgttgccgaagagtattctgacgaaggcttttctggaaagaatattcaagggcgacaggagttccagaggatgttaaatgacattcaggagaataaagatggtgtttcctatgttcttgtatttaagctctcccgatttggtagaaatgcggcagatgttctaaattctttacagattatgcaggattttggagtgaatctgatatgtgtggaagatggtattgatagttcaaaggatgccggaaaattgatgatttccgtattatccgctgttgcagaaattgagcgagagaacattcgtactcaaaccatggcaggtagggagtaaaaggctcgtgaagggaaatggaacggtggttttgccccttatggctataagttgaagaatggaaatcttgtcattgcagaagatgaagtagaagttatccgagtgatttatgaccgttatatccatacaaatgaaggtgttgcaggagttgcaaagtatctgaatcgtaacggttatataaagaaactgagacagaataacaccatacccggattttcaagcaattttgtaaaggatgtgttggacaatcctatttatatggggaaaatagcttatggcagacgaagaaccgaaaagaagcaaggaacacgaaacgagatgcacgtagtagagcaatcggagttcaatgtttatgaggggcagcatgaagttattatatccgaggaagattgggcattggcacaggagaagcgaaaacgcaatgctttcaaaagggaaaaggtcaataacccagaccacgcacatattttgtcgggtatcttaaaatgtccttgttgtggtaaaaacttgtatggtaatatcgccaaggctcatagcaaagacaataaaacaagatattattactattgcaagaatacagtcacaccaacagggcatgagtgtagtttccgattaaacattgagcagacagaaatcaataaaatggtagcaaagattatttctgctatggtaaataagccacgatttgtagaaactatcaaagcgaagattggaacggctgttgatacggtagacatggaaaagcagtttgatgttttgaaagggcaattaaagcaggcatttggaacaaaaagccgaatagagtgtcagatggataccttggatattaacgatgctcattacgatagaaaaattttagacttgcagagacgttatgatgaacagtatgataccatagaggaaatcgaagggcagattggagaactgcaaggacagattcgcagtattcagcaggaaaaaatatccggcgataatatctatcagcttttattggcatttgatgaaatctatgattctgcaacagaggtagagcaaaaagaatttatgaaagcctttattgagcgaattgatatattcccggaaaagaggaaagatggctgttggataaagaatatcgtattcaattttcctgttccggttgatgggaaagaagtaaaagaacttcccttggaatacgaaacaactgtcgagacgatctgcttactgtcgagaaaggcccgataaatcaaaggatttcgctattatgggaataaaatagatgtgtatttctgtttccgaagagtgatgatataacagaaggtttaccccaggggataggctttggggaatatccaaaagcatgttcctattatggacggtatatcataaatgtagtaaactaaacttaccagaaaacagaatttcggaggaatagcggtggggaaaaagacggaacagtctcaaaaagtatataatgagatggcgtgggaatatgattctgccccggagggcagatacacaagaccccataaagaagaaattattaaaaaggcagcgctcagggatggagataatattctggacgttgcctgcggaaatggatatttgcttggagaactttccaaaaaggcgagagtcaatgcttttggcgtagatatttctgaaaatatgattgcctctgccagagaaagatacccggcatgtacatttacggcgagttactgtattcctctcagttttgaaaatgagagtatggatgtcataacggtgtcttgtgcatttcatcactttgaaacaccccaggtctttgccaatgaatgtatgcgggtattgaagaagaatggaaaagtccttattgctgaaccatctttttctccagtggtgcgttggcttgccaacacggtagtatttccattttccaaaacaggtgatgtgagggtgtatagccaaaaggaacttcaattattttttgaatcggctggatttactgatattgaatcgtacacaacaggtacagtgttatttttttcagcaagaaaataaataacaattcgctggattgtaaagagataataggagctgattgcaaatgaagatgccagaaaagatagagcctgtcatgtttgccccctgtgggatgaactgcctggtttgttataagcattgttatcatagaaagccatgcgcaggctgcctgaaaagtgaccagggaaaaccagagcattgccggaaatgcaagattaaagattgcgtggcaaagcggcagattacatattgttttgaatgccctgaatatccctgtaagcagataaagcggttggaaaaaagttataatatccgctaccatgccagcttgatgggaaacagccaaatggtaaaggagcagggaatggccggatttcttgcacagcagaaagagaaatatacctgcctggaatgtggaggaattatttcaatccatgatgcagagtgcagtgagtgccaatacaagctaagtgataaatagaagcatagggagaactgagatgattgatataaaagatataagccatgcgccgtcgcttggggaaattggcgcttatattggatttccgttatttgatacgttttgtcaatacatggatacggaatataaagcaatccgtaaaatcgaatatagtaaggatgtctgggcgcgcgggtggaatgtaaaatttaaaaagtctgggaaatccctatgtgttgtctatccgaaagacggatattttacagttctggttgtggtgggcaataaagagaaggaacatgtggaaaatcaacttccgcacttatcggaggaaatccaggagttgtatcagaatacaaaagaaggtaatggacaaagatggttgatgattgacgtgcattcagatgattgtgtttatggagatgtattgcagcttatccatattcgtagaatcagtaaatgaaaattgacacaaacatgagtggtgtggtataaaaaaagttgacagcttattctcaaggatttcataataaaaccaagagaataaggaggtatttaaagtggcacgtaaatatgaccatgaatacaaagtacaggcagtaaaacttgccaaagaaatcggtggcgctaaggcagctaaagaactaggaatccctgaaggaaccatgcatacatggctgaaagccgtaagagctggtaagttggatattggggaaggttctcatacccctgccagcgcaatgagcctgtcagaagagattaccatgctgcgtaagcgggttaaggagcaggataaagaaatccgccgcctgaaggaagaaaacgaatttttggaggaagccagtgcttttttcgccgccagccgtcggaagtcagcaaaaaccagagaatgatctttctggctttgaaaacagaggacggcaggatgaccgggaaaatttcattttactgccggatgcttggtgtcagtcggcaaggcttctataaatatcttgcaaacaaagaccgtccctggaagtaccaggatctggcggatgccatgaaagagattgccagcgaggatgaatgtaacgatacttacggacggctccgaatgtatcaggcgctgtgcctgaagcagccggagggagtatcaattcccagcgagagaaccgtataccgggttatggagcagattggcctgagccatcggccaaagcgaaaaccgaacggaattacaaaggcagaccgggaggctatgaaatcggatgatttgctgaagcgggattttcattcagatgccccattgaaaaaatgtattacagatatcacggagatcccggcatccaatgggaaactgtatgtatctgcgattttcgactgctttgatcttagtgtccttggtctggcaatggaaacaaccatgaaagcagatctgtgtatccatacactggaaagcgccctgactgcttatcctgcactggaaggcgcgatcatccacagtgaccgtggaacccagtataccagtgaggcctaccgccagaccatccggaagtaccacatccatcaaagcatgaacagtgccggaggacgctgccatgataatgcccgctgcgagagcatgtgggccagaatgaagacggaacttctctacggccgttatgacacaaagcagatgacggtagaggaattaaaagtactcatttggagatatttccacagttactggaataaccggaggatctgctctgccaatggcgggcttcctcctatgataaaacgcaggaagtattatgaggatttggaactggcagcatagtcagtgatatccttgagaaaaatgtgtcaactaatattgacaatatcaatagcagaaatacagatttatgaggaacgcaaacccaatggtcagtggcttaaatcaattcggtttaagctgccgattattgaaaatgatttgagcataggtttggacaatggtgaacacgttgagacggtagtattgatgtcaagggtcaaggattaaagtgtgcgaaaacccttgaaatcaggcccttttcggctttcgccagctttgagagagaccgggtggacagacgcttggcggtaacatatcaaagcgcatttgaggcaaaaatgtgatagggtcgggttgccggtttagatgtcaggggttgagttgccagattagatgttgggtaggttgtggctatggattagatgtcaaggccgagactgaataatataggatttgtggaggtgagcaatcatgaggatatttgctttgcagcttgataatgacattaaaggtataaaagtcagaaaagaatatatcgaatctctgattgacatcttgccgtcgccggaatttgttgtcctccctgaattggcaatttgcagttatatggcaagtcagaaagtctgggaatatgcagatgattgcggacgggataccgcagcgtgggcaatacagatggctcaaaaatacgacacctatgtgggagtcggatatttggataaggaaaacggagattactataaccgttacatgattgtcaacgccgatggcgtttgcggcattgtcacaaagtccgaaggagaatctgccatctttaagcgcggtaattttgataatctgatagaaacaccgttcgggaatgtcggcgtagcgatttgctatgattcccggagaaaacacttctacgacaatatgaaagataagcaggtatcgcttattctctttccacacggttctccggctgatccttcaaaagttgatgatgaaatagcgacaaatgattatttctgcggatgttatgcagaagcttttgagactccggtagtttatgctaacagcatcggtgcactggaatatatgccgggaaaaatgggacggatgatgaaaaaagcaggctttcgcatgaatggcagaacgaaaatatacgggagtgattgtaaacagattccgtgcgagatcccggaagcggtcggtatagagacggatcttgtaaataagagccgtaagtctgatatcaggttttacggcgaagatatcaataaaggaaactggttcttccgcaaattcatacttgaaccagatacaaaaaacggcatcagacaatatgagcagggaaaaaataaggagaacgatagatagatgttgctggaaaccgaaagattgatgctgcgggaaatcagccaaactgactttgacgcgctgtatgccgtgctcgctgattctgatattatggagcactatccatatacttttgatgaagaacgtgtacgcaactggattcggaaaaacgaggaacactacagcatattcgggttcgggctgtgggcagtttgcctgaaagacaccggtgagatgatcggtgattgcgggttgaccattcagaatatcaacggaagcttcaagcccgaaatcggttaccatatccgcaaagactgtcagcgaaaaggttacgcaaaagaagcggctgcggccgtccgcaactggacatttgaacacactccgttccgcttcgtatattcctatatgaaagttgcgaatgacgcctcattagcaacggcaagggcaatcggtatgcaaaaacttgatgaatacgttgataatgagaatgagcttaccgtggtatacggtatttcacgggaaacgactgatgaatagattgaaagctgcaaatgctattacttcaagtagaatcgtgtttgctctgctgattctgtttgcccctgttttctcagttccgttctacgttttttattttctgggcgctgccactgatatggcagatgggatcatagcgagaaagctgaatcaggaatcatctttcggagcaaagctggatacagttgcggatctggtattcgtcattgctgtccttataaaaatagtcatgaacgtgattgttcctacatggctatggatatggacggcgattattgccttgataaaactgatcaatctcatatccggatttgtagtctgccgcaaatttgtggctgtccactcgatcatgaataagataaccggcggcatcatgttttgtctgccactctttattggccttaagctgccacaggaagtgatttccggtatatgcatcatcgcctgtgcagcagcgacatttgccgcaattcaggaggggcattatatcaggacgggcaaagtaactgagcagcaaatcagaaacgagaggtgataggatgaagctgaagaatgtattgattgtggtgaaggatatcgagaaatcgaagaagttctatcacgatttgtttggacttgaaacggtgctggataatgacggcaatatgatcctgactgaggggcttgttcttcaggaggaaaaaatctggaaggactttttgggggcgggtacgatcccgcagaataacacaagtgaactctattttgaggagcccgatatcgaagcgtttgttgataggcttgagagatactatccttcggttcagtatgtgaaccgattgatgacgcacagctggggtcagaaagtagtgcgcttttatgatccggatgagaacctgatcgaagtcgggacaccggtgtaacgggaagagtataaatgaaaatcctaatcccccagctatgctggggagaatggagtaagcagaagcgtgtatgatatcaataaaaaacctcctatgatacaatgagaatggtatcgcaagccaaactcaaacataggaggtggtccttatggacaataaaagtttatcacacacaagatggaaatgccagtaccatgtagtttttatacctaagtatcgcaagaaagtgttatatgggaaattgaaagttgatgtacgagaaatacttagcatcttatgccgctataaaaatgtggaaatagtagcaggagcagtatgcgatgatcatgtacatttaagtgtagcgattccacctaaaatcagtatatcagatttcatgggatatttgaaaggaaaaagtacattaatgctatatgataggcatcccgaattacaaagtaagtgggataaggcattttgggcaagagggtattacgtagaaacaattggtaatattacagacgaagcagtacagaagtatattaaagagcaagcagaggattcaagaaaagaagattcaagaggtgccgctttatagcggaccagtaaaagtgcttgcgataccgcccttcggggcgagcagtaacaatagccctttggagggctaagttacaaccaccacttgaagtggtggttgtaacttagcggactcaagatgtctaatgacgattttgaatctcgttggagcgcagattaaacataacaggattctcctcataaaatatcacaacgaggaatggggtgtcccactccacgatgaccagaagcagtttgaattcctcatgatggaggtcatgcagtgcggtttgaactggaacatgatgatggaaaagcgtgagatatttcggacttgcttcgagaacttcgattatgacaaggtcgccgagtacggagaagctgacattcagcgcatcttggacacaccgggcatgatccgatcctgcaggaagattgaggctgtaatcaataacgcgagatgcttccagcagattcgtgaggagtacggcagcttttctgactacatttggagctattcgggcggcaagaccattctttataacaagcacgcagacgggtggattcccgccagcaacggtttgtcagaacggatcagtaaggatctgaagaagcgaggtttcaagtacatgggtgaaataaccgtttattcacacctgcaggcttgcggtatcatcaatgaccacggatcagattgtccgtgctacagaagaatcaatgacagccacccgacggtaaataagcgccgggacaaggaaaagaacgtcgtctactatggagacaggtaaaccttttaaggtttcctaaacaatttaaggattgcacactttttaaggattgcctgttaggggtttcggaaaggaggcacagccggaatgagtacagcgacagcaagagcatatcagccgtatttcgcaggccggtttatgccctctgaaaagcgaaagagcccgcagaataaggctttctacgggcatcgggacacatattcgggaaaagcacattgtatcaaagatagcgtcttgttagacgacacctgcgggagcggtggtttccgtgcgggtgcaaattaagaattagtgaggtgaggtcacatggacaaagatccttttaaggagtatatcaaggagtccgagccggacaagcgggacaaaggttatgcttggcacacagccattggcctgcaggcggttgatggactcaagacatcggaatatctggtgcggacggctgtccggaatatcgagggcgagatcacatttgaagaagcaaatgaactcctgcagtcctactacaaggaaaatcctgcccgtgatgcatctgaccgcactgaggaggcagataaggtttccgcgaggattgcagcacttctttctgagcgagctttcagttttacgccgaatgagtatctttctatccatagaaagctgttcaccgggatctattctcacgcaggccggattcgggattacaacattacgaagaaggaatgggtgctgaacggcgcggccgtactctacggcagtgctacggaacttcgggcaacattggattatgatttttccgaagagaagaagttctcttataagaatctgtcgatggacgagatcattcatcaccttgcttatttcgtttccagactgtggcagattcatgttttcggcgagggcaacaccagaacgacagcggtattctttatcaaatatctgcgcacgctgggctttgatgtgacaaacgatatttttgccgagaacgcatggtatttccgtaattcgctggtcagggcaaactacaacgatctgaaaaacggcattcatgaaacgacagaataccttgagacattcctccgcaatctcctgctggatgaaaaccatccgctgcataaccggacattgcatatcagcggagcatttggcgagcctgaaaaagtgaacattgacgaagaaaaagcgaacattggaaaagaaaaagtgaacattgaagatgtgttcacagcaaagaccgcttcgcatattcatgaattgagagaaaaacttggccagcaggccgttttcggcagatcggatgttcagaatgcacttgggctgaagccaacgagaagttccgcgttgctgcgtgagatggcagagcacgggatcatcgagccggtctctgggcacggaaaaggaaagtatcgttttcggcagcagtagggttgaggcgatgggatttcagacttgttcccgtcgagcgaagtcttgaagcgatcggcgatttgtccggactgcatataataggtagaacagcgggtgttgacctgtttccgctaacgagcgtggtcgtgaaaatggcgattttcgggtaaaaatgcccttggagcaattcccgtttacagacgggctaaatttgacatcaattcggagcaatcgagccatgtggagacggtagtattgatgtcaaggcgagacacataagaggctcgaaagcccttgagcactttccggattccgtcagcttcgagagaagtcagctggacaatcgctctgcggtaacttatcaagaccaatttacggccaaaatgtgacagggttgggttgccggattagatgtcaggggttgagttagcggattagatgttgggcaggttgtggctgcggattagatgtcaaggtcgggaagggttgaaaataaaggaattgtgggtgagcaaatcagactgatggaggtagattggctggaacctgatacgcaactaaagtttacaaaagtcatataaatatgtcgcgtttggttggtggagtctacacgcgcccttgggtataattaatatagaaactatcgaaagagggtgcgaaatgagagtgataaaaatcattttaattattattctgataattgctgccgtaggtacgatagtattcagtatatattggtatcgtaacatccattggtataataaatatgagaaggctttgcatgaggttcacgctacagaaaagcagattacattaccgaccggaagcatcatcaattacggagaggttgaaaatgataaaccgccacttctcctgattcacggacagatgggcatatgggaggattatgcgcttgtcatgcctgaactaggcaaaaaatggcatatttatgctgttgatgtatatggacacggagaatcatcacacgatgaaagtctctattatctcggcgtgaacggtgacgatctgatctggtttatcaacaatgtcatcggcaagcctacagttgatgccggacattccaacggagctatcacggcagcatatgttgcggcatacggcggtggcaacattgcgggtgtggtgcttgaagaccctccggtattttcaaccgagggagaaggctgggaggacagttttgcctataaggatacgtacaagcctttgcatgattacaataagtcggataagacggagtgctgggaagcttattacctccgtcactgctactgggggcagctgtatatgaaaaatgcaatgccgggtattgctgattatgctcagaaatatcatgacaagcatcctgatgcggctgtgaagattgggtatctgccttcttctatttggtatgtgtttgaatatgccatagagtatgattttgcatatggagagcgtttctatgacctgagctggaatcatggcctcaggcacgaggatatcctgtcggatattgaaattccatgcgtgtacattcacgcgaaggaacaggtggatgataatggaacatatctctgcgctgcttcccgcgagcaggctgagcgtgccgtttcttacatcggagataattgcagcctgttggagacggatacaagtgatcatgtaattcataccgttcatagtgatttctatatccaagccgttaatacattgcagaaatgaggattttgatttgctgaaagagaatctgatcatgctgcgaaaattgaaaggtttttcgcaggaggaaattgctgaaaagatagatatttcccgtcaggcatatggaaaatgggagagcggagagacaataccggatatagagaagtgtgccttgctggccgaagtatatggcatcaccatcgacagcttgattcgtgagtaccaggtagagaatacgcctatggcaccggctccggaaggtaagcatattttcggaaccgttgcaataagtgagcgcggacagattgttattccaaaggaggcacgggaattgttcggattgaccggcgggtgtaagatggtaatccttggagatgaaaaggaagggttagcgttggtcagagctgataaatttgagaagagaataaaagatgttctgacgaatgctggaatggataccaatattgaaaaaagcaaatgatgttattaaacaaagagagcaagccgccccataggtaaatcccatgggcgacttgctcttattctgtaatattgatgctgagaccggatttgaactcgaccgtgaagtggtctgcctcagtgggcgtataaaatttaaagttttgtcacaaaatatcttttgcaaatgcttgcaatcgcaagcgaaagcgaatataatataagaaaaaaggaggcgatactatggcaaacacatccgctgtatatgcaagaatagataccaatcttaaggataccgctgaaggaattctttctcagctaggcatttctccatcaagtgcaattcagatgctttatagtcagattgtactgaagaagggcatgccgtttgatttacgtcttccttcttcaaaacctgtcgctgtcggtgcaatgacgaaagaacagcttgatgcagaactccaaaagggtgttgattctatcaaagcaggaaaagtatattctgcagatgaagttgatgcagcacttgcgaaggagtttggtatatgacggaaaattatacagtcagctactctggggatgcacttaatgacctaagagaaatctacacctacattgcaaatgaacttcttgttccggagaccgccgctgctcaggtggggcgcatccgaaaagaggttctttccttggatttcatgcctgcacgctacgcattagtcgaatgggaaccgtggcattctatgggaatgtaccagtttccagtgaacaactttattgtgtattatctggtcgatgatgaagcaggaactgttacagtagtccgtgtcttctacggtggtcgtgacatcgaaggaatcgtaaattcacatgagtaatgagtaaacagtagtggagcttttgcgtaaaaacaaaggctccatttttatatgaacaagattcctctgtcatcataaacagaagcaccggtattatttccacagcgaatggcacggtcaagccccatgatggtcgcaacagcaccgtcgattttttctgtggatttttctttgtctgcttttacgtttcctgcctgatcagcacggatataaatgttatccatcatccagcgaagtaccggatgaccgccgtgagccagcctttgctccagcgtcagtttcatgagctcttttgtcggaagtgacatgtccttaaagatctgaccaaaaggaacaacagtaaatcccatgccctcaaggttctggaccatctggacagcgccccagcggtcaaaggcaatttcacggatattgaaacgttctgcgagctgttcgataaatttttcaatgtaaccgtagtggacgacatttccttctgtagtctcaaggtagccttggcactcccatatatcatagggcacatggtcacgccggactcggaactcaagcgtatcctccggtatccaaaaatacggaaggatgcagtgaatattctgaagtggcggagccactcaatctcataggatagagccagcgaatccgttatcgggagccagccgtccgatggcgggagccataacctgtgtcgtggctcccgataggatgatttagttcttaatcatccctttcctttgtcgcatggaaacatctccgtcaatccgcatggtataggcagatggtatgatgcgatccaggatagaatcggcaagggtactgccgcctctatggcatcatgatgctgcaacatcttgatgcctgggaaatgccgtcagtcgaggcatttcaaaaatcattagggttagccgcctaacaagaatatcttaaacggctttatatgatttttcaagacatagtacccgctatgtctaatgtttatgtccatttctcgcaaatttcttttcctgcacgatattcagttgtcaatttccagtaactttccagctatttcgtaccgatgcgttactggtttgctgtgatttcagtttactggaaacagatggggaacacattgagcgtaaattgagggggaattgagcaaaataagagatatgttttgtggactgttacgcagatttaaagacgtgattgtttagattttgtttaacttttatggagttgtagtttagtattgcctgttatactggattcatcaaaacgagaggagcgtacattatgagcaagattcatgaaagaataatgaggatgaatactggtaaacatttaaagcaaataattattgcagtgctttgtgttctgctgattggaggtggattatccgctgtcatgcttcgtactcaaatcggtgaggtagttactactgtacagaaatgggatgatgaagaaggagataaatcggaaaagcataaagatacgagagaagaacaggatggtgagaaattcaattcacagtttgaaaacgattatgagggcgaatttgacgatatagattatttcgatcatataacagaaccatctccggctgccaaggtagttgtaggtctaacaggtcttttggatacgttgttgacaattgcatattggattctggttgcggcatggctttatcaacgggcaatacaggcggatatgaacggattgctctggttccttttgggaataggcggtaaccttggtgcagtggttgtgtttcttgtaatacgcggcatatttcgtgaaaaatgtccgtcctgcggaaaatggcagaaagaatccatattttgcagaaagtgcggcgcagccgtaagtcaggtgtgctcagattgcggtcagacttgcagaaatacggataaattctgtggaagttgtggaagaaaattgaaggatgagaaataagggattccatgaatcctattagaaaacagtgctttgctttacggaatatttgagatataataaatcgtagcggagttcctataggacagaagcatattgcagaataaatttcaagggaagggaacaggcagattctcttcccttaaaggtggttataaaggatatgggaaaagaaaagagaacagtaaaaaagaaaatcttttattcgaatacgttgatggtgctcgttacactgctgatttttcttgcagtaaatcttgtaatagcaaaagtctatatagaaataattgaacaggacttccgggaaagtattacatggagtgacaacgaagaagatttagaggatgttttgcaggaactgacggtttataaaaatgcattcattttcctgttgctgctggacggagtgatttgtattggtgtgttgctgtttatcagtcaattgtttaccagaaatttaacaaatcatatcctgaagccactgaatgaactggcagatggagccaaccgtgtgaaaaatggtgatttgacagttcccattgcgtatcagggagaatcggagtttgaggatgcctgtcatacattcaataatatgcagtcccatatacttacagagcaggagaaaaatcgaaaatatgaaaaggctaggactgatatggtagccgggatttcccatgaccttcggacaccgcttacggctgttcgaggtactattaaaggactgatggatggaatcgcttcttcaccggagcagcagaagctttttttggagacggcatatcgaagaacaggagacatggatgcacttttacagagacttttctatttttccaagatggaaacaggaaatatgccgctgcatatggaaaaggtaaacctggctgaatttgtgaatcgttatgtcagagggaaacaggatgatccgaaaaaaatagaacattctattttggcagatgtcggggaagatatttgggcaacggttgacccggaacagatgcagagaattctggataatctgttggaaaacagtttgaaatatgctgaggcagatgaactgagaattaaggtggaattgagtaagaaagaacagacagcacatttggttttcttggataatggacaaggtgtttcggaagaaaaactctcccatattttcgaagaattttaccggtgtgatgaatccagaaaccggaaagaaggaaatgggctgggacttcatattgtgaaatatcttgtggaagctatgggtggaagcgtttatgcagagaatctggagggattggctgttcacataatttttccactggcagaggagaatgagaatgggtgagaaacgaattttaattgtggaagatgatgcggatatcagcatgatagaagaagcgtatctgaatacagccggtctggaaacaaaaatcgtatccgaaggatctcaggttgttccattactggaaaaagaacgctttgacctgattctgcttgatttaatgctgccggataaaagcggatacgagatttgtaaggaaatcagggataaactggatattccaatccttatggtgacagccagaacggaatctgtggataaacttcgtggattcggggccggagcagatgattacatctccaagccttttgatcctgcagagattgtggcaagggtgaatgcgaacctccgtcaatatgagcgcagccggttcggagcagccaagaaatcagagaaaaatccggatgaaattgtcattggagatctgcgaattcttacggaaggctggaaggtttacaagggcgagaaagaaattcgctttcccaacagagaatttgaacttctgcaatttcttgcgatgaatccgaatattgttttttcaaaagagcagttatttgaaaaaatatggggttatgattatgttggtgacagtgcgactgttatggtgcatatcaatcggattcgggaaaaaatagaggatgacagcaggaaacctaaaatattggaaaccgtatggggcgcaggataccggctgaataaataagagggaaatgtttacaaatctgggaacagcaatcggaatgcttttgattacttttgggacaatccttttagcaatcgtttagaaattgtttagaaaaacaccttctgtttgtttaaggtagattgttaagatatctatcaaaatcagacaggaggtttttttgatgttaaaggaaggaatagaaggattttgtatggcactggctgacagtgtgccaggagtatcgggtggaacagtggcatttattatgggattttatgaccgttttatcggttcgatcaataatattgttttcggaaaggcggaaaagaagaaggaagcagcaagttatttgctcaggcttggtgcaggctgggtaattggaatggctcttgcggctttggcactttcttctttatttgaaagtcatatttatgtggtcagttcactgtttattggattcattgcgggagctatcccgctgattataaaagaggagaaggagaatttttataagattggaaaaggtgtattgtttctgatattgggaattctccttgttgtagggattacctggatgaacggaaaaatcggtggtacatctgttaatctttccagtttttccatggggctcggtttgaaattgtttctgattgggatatgtgcaatctctgctatgttcctgccggggatttccggttcaacattgcttttagtgtttggagtctatatgccagtcattactgcaattaagggaatccttcatttggaactttcctatttcccatcacttgctatgtttggaggaggcattcttgtgggagcacttacagtagtgaaaatcattaagttgtgtctggagaagttccgggtgcagactgtgtatttaattcttggtatgatgatcgggtcattttatgcaattataatggggcctacgactttggaaaatgcaatgcctgcaatgagcctgaatagtttccaggtgatttcatgtattcttggatttataatggttttaggaatgcagatgatgaaagagcggaatgataacgataatcggtgaaaaggccgcagctgccgatggagtttttatactggcagttggggcggcggtaatcggaagcattatctttgggcctaaaatcctgttagcaatcgtttaagaaatatttagaaaataaccttccgcttgtttaatgtatgcagttatgctatttgcagaaaacgaacagaaggtttttgcttttcctaaactggtgcaggaagcttctgggaaggtttctatatgtgacgtaaagaaagaaggaaatcaggtagttctcgtggatgatggaagcggcgaagataaacagcaggaattctggaaactctccgaatatgcaatcgtactgcatcatgaacagaacagaggaaaaggaactgcaataaaaacagcgttgaagtttatccaagaaagcctctgggattatgatgtggtgggaatcatggacaaagctgattttgaaggcaagatcctgcggcaaatcattgattctgggaactagacagatttctgaaaagatgccgctccgttcccgttttggcaatacgatcacgagaaatatatttcgtttaatgacggggactgcagttagtgatacacaatccggtctgcgggcattttcaagtgaaatgaaccgtgagttttgcgaggtttccggagaacgttatgaatatgaaacggaggtattgctttattgtgcaaaacagaaaattccgattgtggaggttccgattgagacaatttatcgggataaagagaacagcacctcccattttcgtgtaatacgggattctttccgtatatataaggagtttataaaagaatagatcccgtggagattttcaaagttcacagcatttccttttccagttttctcctggctgggtctattcttatcatgaataacctgattttggaagagttcatattcgtactccatcttccaatccatccggcaaagtttttgacagagtgtatattgtttcttattagctggtttgtgcagaacaaggtgattttcggacagaaaaaaatgtttacattcagaacggcaaaagaggtaaaaggttatccacaagaaaataataaaaatcttatcttttctacacataaaatacaaagttgcatgataatatatgtacatttaaggagatgaaagcatgaaaacgatattgataatagaagatgaccttgatatacaggagatgctgcaattcttcttagaggatcaggggtatcaggtgcttgcggcagaaaacggaattgacggtgttaccgcatttagaaagggaaacccggatctgattctattggatattatgcttcctaaaatggatggttatactgtatgtgagatgatacgtcaggaatcggagatcccagttattatgattagcgcattaggaagcgaggaagaccagttaaaaggttttgaactgcagattgatgactatatcccaaaacctatttcacttccaatcatgatgaaaaaaatagaggctgtaataaggcggtatgaaaataaagggctggaaaagaaagaagagctacattataaagaaatgacattgatggttgataactaccgggtgaaggttggaaagaaggacattaatctgacgcagaaagaatatgaaatcttgaaggaattattggagaatcagggcagggtcattagcagggacagcttcttgaataggttgtggagatatgaatatgtaggggaagagcgtgctgtggacaaccatattaagaatctcagaaaaaaattaggagatgccgggaactatattgagacagtaagaggagtaggataccgagttgaaaaaatatattaaagagcacttaggagttaaaatatttttattgacagctgttctgttactgactgtaagtgggctggtctatggaatggtagcttttggggtatccaagagctatttggcagagttggatgacagccttgataaatccacacaaaatttagtgtcacaattatcagaagtgtccgagcaggagatgggaaccatgctgaaaatgtttgctttagaatacagcctttccattacgttaatggatgagaatggaaaagagttacaatcgttcggacagattgaatacaagctggatccgaaaacagacagcgagaaatcccagataagcaaagggataacaaaaacctattttgtggatagaaaggagggttctgattaccagatactgatatttgggacgaaacaacggacaaatgctgctttggattccctaaacaggattttgcctgctttaatcatcattgcttttttaatctcgctcataattgctgtgttttacagcaggtatgtgactaaccctatattagtgttaagcagggcatcaaaaaaactagctgatctggacttccaaatacagcgtcccgttaaccgaagcgatgaaatcggcatattgggggaaaatctgaaccgcctggcagaaggactggaggaggcactggatgagctaaaagaaaaaaacctgttgctgcagcgggacattatgcgtgagaagcaaatggagcagcagcagctggatttcttttctgcagtttcacatgaactaaagacccctgttactgttctgaagggacaattacagggaatgctttatagagtcggcgggtataaggacagagataaatacttaagacgttcctatgaagttgtaaattccatggatgacatgatcaaggaaatattgtcagttgccaggataaagtcttccgggtttgctctgagcagggttacaatagctttagataaaatagtacagggggttattcataacttagaggatatagccattaataaggggctacagctgcacattgaacttttagaacaagcgggcgtgactgttgacaaggcactttttgaaaaagtaattagtaatttgattgggaatgcaattaagtataccccagacaatggcagcgtttggattcgtattttcagggaagggggaaatattatcttttcagtagaaaatgaatctgaaaacatacccgaagcggaaatcccccaattatttgatgcattttaccgaagagataagtcacgaagcaggaagacaggtggaagcggccttgggctttatatcgttaaaatgattctggaactccatggctttgcgtatcagttttataatacagagcatggtgtggcaataaaaatcatattcagttagaagcacggacaggttatcgcagacgaatcgtttgcggcagcctgttttttgtgcaatgagttagggagaaacagagctacacataaactacacataaaatacgcagtaaacttataatacgcaggtatattaatatgcagagaggaggaaatgatgtccaggagaaaaaaatacgcagtaataatggtgtaaacgaaggggtagttcattggaatgccaaaactgctttttcgtttaccccatcatcgattctaacctaaagaatttacaagccataattttactgggctgaagattccgagtgattattaataaatacaggaggttgagtttcatgaaaaaaagaataatggtaattatattggcggcaacattaggggcggcagtaataacaggatgtggtgataatacagcttcggatacggggaaaagcgttgtggatatgctttctgaagcaaatatggtggctacagtagtagatttctctgaatcaggatgtactgtcataaagggaacagaatcagaggatgagcaaaaactggcgtcagccgggggggatgtcgatgacaaaagtaaaattaatgttgtttatagcaatagcgtgagtttccaattagccaccgctactgtcggtgcaagtgacgcaaacttggaggatacaggtaagagcgaattaaaaaagcaatctaacgtatatctttatggaacttatcaagatgacgggactttcttagcagacaaagtaattatttatagaactctcagatagaggtgaacggaatggaattttataaaagggctatccggtatcttgccagaaaaaggtcaaaaacggctatcttatttttggtgttgtttgttgcggaaaccatgattttatgtacggttacgatattgagggcttcagaggaagccaaaagcagcctgcaggaaaaaacaaaatcaaaggtaatcgcagaaatttcagataaggaccatcttattacaacagaggatatcaatgctatttttaattttgatggcgtaaaggatatcaataaaatggcaaaaagtcagtgctgtccggttgggttccgtttgtatacgggaaaccaagattcaacaaaggagaattcgcaggcacaggttgttagttatgacagtctcagtgcagatggcccgttcgccgaagggcagataaggcttataaagggggattttccggaagataaaaatgaaatagtggtaaaccaaaaccttgcagagatgaaccaatgggaattgggggataccgtgctgctgaaaaatgatgccggggaaaaaatcaatgccgtgatatccgggctttacctatcggggacggaatcgaagcagaccaaaagcaccttggctgtttaccggatagagaacacgatttatgggatgcctgaactggcgctgaagctgcagagacaaaaaggatttgagagtgcttctgtatatgtaaaaaacccagagcagcttaccagtatcgagcagcagatatcccggaaactgggaaaaaaagtggaattgacaaaatctgatgccctatacaggcagatggaacagccgcttaaacaggtggtgcgcgttgtgaaactgatgctgatacttaccatagggacagcagctattgttatcacacttcttttatgtatgtggatgcgcgccaggaaaaaagaaacagcagtctatattagtctgggtgaaaataaagggactatttttcttcagatacttttggaaggtcttttagtgttttttatggcaacagtcatctctgtcttgtcaggaaattacatggccggagccttaaaaaaactgctgttcacggaaaaccaaatttcttctgttccgttagaaatcggcatccgtgtagcagacattggatggcttgcagttgtcggggcaggaatcttattgatagcagtaggtatttcattgattcccattttgcttgcgaatcccaaagatactttatcagaaatggagggatagaatgaatgtaatgcagaggggatttcggtccataatcagaaaacccataaaaagtatactccttttgctggtggtcgtggtaatcagcagtttctttatggctggtctttccggtcaatcggcaaatattaaaacacaggatgcaacacgacaggctgttggtgctactttcaggctggaggaaaatgaagccaaccggcacaaaagaatagacgaagcgacaaaaataatcggtgaggataaagaagggacatatggcggctttacgcagaaacaattacccaatggcgcgtggatgggcaaagcagacaattcatttgaaaccataaaaccggaggatgcccaaaagattgccggagtagacgggattgaggcttataacttaattaccgtatcgacacccgttaacccggtgaatttcaaacgcattgaggatccagatgtagaccaaagcagcgaccttggcggcgtgaatgtgcggggaaaccgtatcatggaaatggacatggatgtggcatccgggaaaatcaagctcgtggaaggacggatgatcaaagagaatgaaaccgatgtctgcgtggtttccgatgaacttgctaagttaaacagcttaaagcctggggatgagcttcagtttaataacgccaaagacaaggaaaactcccaggaatacagtgcaaagattgtaggaatctacaagacgacacagaaaataaagcctgtgatgtccggtgacacctaccggtcggagaacacaatctttacagacctgcattttccggagaaggcgtccggagaggagggcaatcccctcttccaatatgccatcttcaaggtgaaggacgtggatgcctatgaccgcgtcaaagcggacatccagaaggtggatattggatgggagcggtatgacctgatagacaacaacgggaacatcaagagcatggctgagaacttcaatgacatggagaaaatcagcaggatgctgctgctgttagtatcctcagcaagctttatcatcttggtcctgatttttctgttctggatgaaaaacaggacacaggagatcgggatactgatggcgctgggggaaagcaagaagcggatatggatgcagttcctggtggaggcattattggttgggtgtattgggtttgtcctgtcgatgggtgcatccccgttcctgtcaaaggcgacagcatcctatctggcccgccagacacaagagcaggcagaggagcaggcagaggctgatgcggacagtataactacagactatgtcgcaccagagctgacaataacgggtacggaaattgtaataactgggaaaatggtggcggcggatgcggcagttatagttacactgctatttgtttcagtgtcggtagctggaattaccatcatgagaaagaaaccaaaagagatcttaagtgaaatgagctaaggggaggggtgttataatggcagagaaacagagtgaaaagtcaatattggatattctgtcttttgacgcggtgctgcaggaagcagaggagatagaaatcggccatatatgtctgagactatatgaggatattgaaaaagcaatgaatgaattagggatacacataatgttaaatgtttatgaaggggcggagaatatgaattgccttttacggcgaaggcgatgggctaaaggctgattttgaggcacagcataacgcacggaaccaaaaccttgattatgctatggaaattgtacagcagttcatgtggctgcataacatatgtccgatggtcatactcaatgaagatatctggaagctgggaatgggatttgaatttatagataggagagaaaatacatgatattagaagtcaggaatgtgaactatcattataaagcgaataaggataaaaaaattctgaataatatttcttactgttttgaagaagaaaatgtatacgctattttgggaccgagcggttccgggaaaacaacatttttgtcgctgctggctggcttggatgttcccgtatccggaaaaattctctataaaggggaagatattcagaaaaaaggcttgaatcgccataggaaggaaaatgtttccctggtattccagaattacaatttgatcgattatttaacaccaaaggaaaatgtaatgcttggcgggaaagaaaacccggaagaattattgacggcagtgggaatcccaagtggtgactggaacagaaaagtcttacagctatcgggaggacagcagcaaagagttgcgattgcaagggcgctggccagccctgctaaagtattgctggcggatgaacccacgggtaaccttgatgaaaaaattgcggatgagattattggtattctacagaaaagcgcccatgagttaggaaaatgtgtgatagtagttacccacagcaaagcggttgctgacgcggcagacatggtagttaaaatcagttcgggggtcatccaagaggttaaagataatttctttcaaaacggcaccaaccagcaaatataaaatttacgcagtcagcaatttggattcaatcgtaggcaaaaaccaatatttttaagaggaagaaaatgatgaatgtgtttcaaaggggaatcagatcgatattcagaaagcctgttaagagtattcttctattgatagtggttgtggtaatcagcagtttctttatggctggccttgcagggcaatcggcaaatattaaaacacaggatgcaacacgccaggcagtcggcgcaactttcaggctagaagtaaatgagatgaacagtcagaaaagaggcgaagaagctagcaaaattcttggaaataaggaaggagaatataatggatatgtgcagaagcagatgcctgatggggcatggctttcaacaggagataattctttctacacaatcagacaggctgatgtccaaaagattgccgaagtagatggaattgaagcctataacttaattaccgtatcgacacccgttaacccggtgaatttcaaacgcattgagaatccagacgtagaccaaagcagcgaccttggcggcgtgaatgtgcggggaaaccgtatcatggaaatggacatggatgtggcatccgggaaaatcaagctcgtggaaggacggatgatcaaagagaatgaaaccgatgtctgcgtggtttccgaggagcttgctaagttaaacagcttaaagcctggggatgagcttcagtttaataacgccaaagacaaggaaaactcccaggaatacagtgcaaaggttgtaggaatctacaagacgacacagaaaataaagcctgtgatgtccggtgacacctaccggtcggagaacacaatctttacagacctgcattttccggagaaggcgtccggagaggagggcaatcccctcttccaatatgccatcttcaaggtgaaggacgtggatgcctatgaccgcgtcaaagcggacatccagaaggtggatattggatgggagcggtatgacctgatagacaacaacgggaacatcaagagcatggctgagaacttcaatgacatggagaaaatcagcaggatgctgctgctgttagtatcctcagcaagctttatcatcttggtcctgatttttctgttctggatgaaaaacaggacacaggagatcgggatactgatggcgctgggggaaagcaagaagcggatatggatgcagttcctggtggaggcattattggttgggtgtattgggtttgtcctgtcgatgggtgcatccccgttcctgtcaaaggcgacagcatcctatctggcccgccagacacaagagcaggcagaggagcaggcagaggctgatgcggacagtataactacagactatgtcgcaccagagctgacaataacgggtacggaaattgtaataactggaaaaatgattgcaacagatgttcttgcaatcatcggtctgctgttatttgctgtatcaattgcaagcatttctattatgaggaagtcacccaaggacatcttaagtgaaatgggttgataattatatagaaaaagtcacttttacagataaaaggacacattttgcaaaagagataccaacttttcgctttaaacaacctcttttgtttgaaaactggattttgctaggacaaattgataaaatgttaacaataagataaaggagatgggtaagatgcagaatcaagtaagtgactatattaaaaagataaaagatttattgatggcaagtaaaaattattcaaatatgaatgaaggtggaaaaccgggagcagtcatttatattccgtctggtgattatcatcttcgtacacaagtagtgattgatatcagttacttgaaaattatgggtttaggacatggttttgtatcttccagtagaggtactgcttcaggcatgccacacctttgccattgaagccgatagtgtgaaaagttatataacagagaagaaacagattccatatatgacaattaccacagactattctatttccgatcaagggcagatagataccagaattggaacttttattgagcttcttcaaagttgctaaagctttattgttttcccggctcgtggtttcacaacagaaatttggggaaaacatacatctgttttttgttttaatttctttgtatctatgttacgggatataggtgggaatgcgtcatcaaaatgcttgctgttcctaaccatatgagtttcattgttatgtttccctttcccgtaatacgtttttccttgttttaacagcaggatattattgtggtaaattacaggctaataaccgaagcaattcatctttttcttcatttgtcaaatcgttcttatcaatcaaaatcattttgttgtctttccttttaacatagatatattctccgaaagtgccatattctttgaacgcattccaataatttatgctttctccaatgttagagataattgttattccattagtatcaaaggtatattcaactattccggaacggaaagacttatccaataatttttctgacttttttaagacatatctttggaaatcttttgctgtatatcccaaaatagcaataaaaattccaagaagcagtaaaatgattccagaggtataggaggcttttgtgcagtagtatataccaataataatttcaagaatactcaaaatataacaaataggttttagtttttgcctctttcggatatttcctttgctttccaatgcaatgttaatggcagcatctttcttttcctcacttaaatccattttatatttaatcataaaaggtttacctccatatgtaatctgtgattcattttatgaagttattgtatcataactgatttctaatggcgctaaattttttttgatatttgaaatgttacaaagttaatatccagaaatttccgatagagtatacacatttctttatgaaataatatatatttcaggaggtgtgaaacagatgaaaaaaaattatggatacgcaagagtatcaagtatcagccaaaatatagataggcagatagtagcattaaaagatgttgggattcatgatgaatatatattcgtagacaaacagtcaggaaaagattttaatcggcctaattacaggaagctggtgaagaacctgaatgagggtgattgtctctacataaagtctattgaccgattgggaagaaattatgacgaaatcatagatcagtggcgatatctcgttaagcataaacatatagacattgtagttttggacttacctttactggatacccgaaacaaggacaacgaaatcactggaaagttcatatccgacatagttttacaaatattatcttatgtagcgcagatggaacgtgaaaatatcaaacagcgccaagccgaagggattagaattgccaaagcacaaggaaaacacttgggaagaccaaaactaaaaccaccaaaacaattttcaaaagtatttaacttatggtattcagggaaaattaaaaaagcggaagcatccagacgcttgaatacaaatcctcatacgtttgcacgatgggcgaaagaatacgaaaaagcccaatttttgttaaaaaataatgaaaaaaggtaggctttttttcatagttggaaaaatagtatttttctgtcatatcgttgtaattatactgcaaaacccatatgtaccatctctataccagattatattgcatgactgaaaaaatgtctaccttttttcaatggtaaatactgacaattcagtgactgtctaaaaaaacgaagaaaggggtgtagatgtgtgaagattgtaaaaagccttcgccgaaagtctcttatgttctttttactgacagcagtcatcgtatcgtctattcctttgggaagtacatatgccacagaaacagatgacctgccggaaagtgaaaacccctatcatgtagagattttaccatccgaggataattcctacgagggagagacacaggcaaattttacggtaaaggtaacttactccggcgtggatgttatccaaaaggaatcggtacatctggaaaccataatattagattctgtgattgcttccttcaatacagaagcactttcggagagacgactgaattcttcggaatttacaggaaattctgaatgggaagaatcatatagtatctccctcccggcactggaaacagataccgaggctgattatatggttatgctaaaagatggagaggacaacattcttgcatcttcaaatcaaaggtttaccgtcaagaaatcaggagcggatatgtgggatacctatgcaaatgaaagcggagaggaagaagtatcaccgaaatcagagggagcaccatctgcaaatgctttgagaagttatacagcaatcacaggaacactgccaaacggaatttcagggctggataaactttattatggaagtgttgaaaaagatgataccgctccattccataatgcgaacgagttgcaggatatcttggaaaacagtgatgaaacttatgcaagagaaatctggaaaaaatatcagtatgacctgtatgacccgaatttcagcggtagaggtggatgcggtgctttgcttacgccttctggtgaaaagtattcagagaagaacctgataaaatacccggatgacagaccggactatgcagatgaattactgacgagtacgcatcatgaatatccaaaggatggcgacagtccttttcatgcaaatgtgaaatcacagatagatgcagtaaaagacggtacactggtaaatggggcgttggtagagaatgacgaaagtgcatttgaaaaccttacaaagacagcatcaccagacatcggagattctaataccagtcgtgagtatacggtggatttaaaagcgacgccgaatctgaaacaagtcaagccaacggtactgctattccagatacagaccagttggcagatgttcgatttgatacatgccaatgacagggcgtcactggtaaacaagaatgaagtcacaaaagaattgttatctctctatgagatgaagcaaggattccttgatttcattaagtggatgcaaccgtacacagatggaagtctgatgatcggaataacgaattaccagcatggtggcagcaattccatgtttggagcaccatattttacgaacaatacaaataacattacagaaggtctttatggctgggacagttttggggattgtgaacacattcactataccaataaagcattggcagatgcaatgaaagaactaaatcaggcaagtaactttactaattgggcagacaataaagggaacctaatctatcaggatgcagaaatgatttccgttatcgtaggtggcgcgtgtgaagcaaaggatttgaagacggggagcaccaaactgccagcaatacccgacggtgttttaaaatgtcagtacggaatccgcaccaatagtggaactgcctatggaaaaaatatgctgggtgacatgatatcatggatggattacgaagctcaggggagcggaaagaagggtgatgctccagcgtttgaaacaggggaatactataaagatgttgttacaagagatcagttctttgagacattgaaatctatctatgcagatgtgcaggcaaaagcgccaaatatgcaaaaagtaaccgatgtgaaggtcgaagataccatcacggctgaatttaaagtggataaatcgaacatcaaggcttttgtaggcggagaagatattacatcgaaagctaagattactgtggaagaacaagcaaatggaacaacaaaagtcacctgcaattttgggacagtggagcacagcaaagaagtacatcttcaaattccggcacaagcaaagagtaactatattggaagcaataatgtttatactaatacaggaacaccagtgatatcttataagggacgtgttaacagttcaaaaacttatacacaaaattttacggataacccggctgttaatgtgccaatcagactgactgttgctgacggacagcgtatagaccttgaaccgggacagagtgttgatttggcagaccttgcaaaagatactacaacgaacgagttgataacaaaatctgtagaagattctttaggtgattatgcgcagattgaaggaacgttaacttatcaatgggtagatactgatggaaacccgataggaaattcggcaacgtctatcatagatagtggtaaccgtgttcctccaacgattccatcctatatagttcatgtaacagagaacgatattgggaagagtgaaacatataaattaaaggtgacattcactccagcagatgtcaaagaggaaacaacttcaaaagtcgctgtaagcgcacaatcacaaactggagatgttggaattagtgtttcacagaaaccggttggaagagttcgtatcaagaaaatgattgataactatgataacactcttgcaaatgatgagtttatgatgaggataaacagtgtaagcggaactgctgtttcttcacaagtcgtattaaaacacaacgaaaccagcggatatgttgaaatcaaggagcctacatggctaaatatcgtggaaatcctgcctatggagtattcttttatagaaatcacgatagagggtacgggagcagataccgccgatattaagaacggccaagtctatgtggagcgtggtgacgatataaccataactgtacataacaaatattcgtggaatcctttcttccatacatttgattccattatgaatgtattcaagagaacataagaaaggaaggatgacatatgagcagggtaagaaaaaaactatgggtggtgtgtggcttatcagttctgctagtcattggaacaaccttggctgtgtggcatcagcatatccagcacacgaatcatctggaggcagataccatcaaagcacaggtcgtggagaattttacgccgagcgagccaaaggataccgtcacaaaggatgtatcttttaaaaacgaagggactacagatgttttcgtcagggtagcatatgtagagacttgggaaaaaaaggacaaaaacaacgaaactatgctgttaagcaatcagttaagtggaaaggatgtggctacaaagaactggacagactccttttctgctgactggcaggatggaggggatggctggttttactataaatacgtccttccagctggcggaagcacagcaaaaattctaaacaatgtcacgttcccggattatatgcaggaagcatatcagaactatggagatgcggactactctctgtatttcaaagtagagatgctacaggcaagcacaggggatgcaacgttgaataaagatacggttaatcaggaagcgtcacagactgtgtttggaaaatctgcagatatagactataaaaccaatgctgtgacatggcagtaaggaggtcgaagatgaaaaaaatatcaaagaaaatcctcctgcttgtcggcggatgcgccgtattggcggtatcgtgtattttggcttacttttccagcagtatgccggtaacaaacccattctctataggacaggcaaacatatacctggacgagacctttgacgtagatgataaatgggttccgggagaagaaaagcaaaaggaagttgcatttggaaatgacggagatgtagatgttgtcatccgtgccagattcacaccagagctgattttgaaaaacggaacaaaagtaaccgatgcagaagtcttaaatggatttcagttaaattattctgaaagttttgatcaagagtgggaaaagcatgacgatggctggtactactataaaaatgtgctgaatccaaaagagagaacaaagcagacgctggtatctgtcacgatgaacaaaaacatcagcaatgatattcatggaaataagaccgattattctggcgcaggtatggatgtagatattgaatgcgaatccatccagacgaccgtctcaaaagacagcagtgatttgcagaactgggattcatacccggtaatcagtggaacagatgtttcatgggtaaaaaaataatctgttagaaataacagtttattttataaaaactaaaaaattatttatatgccgtaggaggaacaaaattatgaagaacaaaaaattaaaagcaatcgcaggattagtagcagttgcagtcatcggagggtcattagcatatttcaatcagacaatgactgtagaaaacccgtttgatacaaataagtattcatcagaactcgtggaaacatttaatccgggagatggtgatgactggcagccgggagcaactgtaaacaaagatattcaggttgacaatacgggtgactatgatgttatcgttcgtgtaaaatttgatgaaacatggacaagaaaaggcggtaatagtgcatatgtaacaaatactggaattaatgattcaacaagtcagacagatgagacggatggtttagtgacaggcgactactctgttgtaaagaaaaacttattaaacgctgacaaatggttctacaatactaatgatggttactactactatttagacaacttaaaagcaggtcagaatacaggtacattccttgacagcgtaaaactgattgataatgcagatatgggtaaatatgaggtcattaaatattatacaagtgcagataataagccggctgatgatgtgatcggagatgatgcgtctactggatggaaagtatatactggagaagtcccagctgatgctaaacacacaagaacagtgactaaacttgtaaacggttgtgaaggatatgcagattctgattataaactgactattacagcacagactgtacaggcttcaaaagaagccgttaacggtgtatttggattaacaagtgtaacaggttcaaattggactttagctgaataacagattacaggattacatatagggagtgctgttattggcactccttattttggtagaaagatgatgaatttgatgcgaagaatttttaatatcctttcatggcttgtcatcgtggttatcatcggctatattgctgttgcatccccaatgctgtttggaaaccgtccggtagtggttcttacaggaagtatggagccgtcttatccggtcggaagtctgacatattatcatccggcaacatttgaggaaatcaaaattggtgatgcgattacttttaaagccggagacagccttgtgacacaccgagtggaagaaaagaatgatctgtccagaaactttatcacgaaaggtgacaacaacgagacacaggatatcaatccggtggaggaagttgaccttatcgggaagacaagcacgattgccattccctatcttggctatatcgtaagctatggaaaaaatatcttggtgattatcgttatgggaacgatactgctcattagccatcttttggattctctggacgaaagacaaaggaggaagcatgaaaaataaagtatggaataagaaatatctgtttacattcgctttcctatgcattttcctcattggcggtgtcttcgcctactggacacaagaactacaggtacgcaatgaatttaagacggcaaagtatgatacaacgattgtagaggaatttacggcaccttctgaatggctgccgggccaagaagtcaataaggatgtgtctgtccgaaataaaggaacgattccagtctttgtgcgtgtttctatccatcaaaaatgggttcgcagggaagatgtttatgatggtgaagggaagccaatatcgccgctgaaaggggaaactattctttaacctttgagaccgggaacggctcagcctatgcatctcaagtgacatggggcaacgatgtggttgtgctgtccagcggaaaacagggagatattgacttaggaattccttccgtggatacgattagggatgccaaagggaaatggctcttattgaccgataaggtggatgaggaaggaaacctccatttctattatattggtaatattcagccgaatacagatgctccccggcttgtagacgctgtaaccatgcaccctgcaattgaaccggaaatcaagggtgaaaaagtgtggtatgacggttctgacaataaggtgacacaggaaatcaaaaatacaacatacggctatgaaaacgcaaggtatacaatgacggtcagtgcagataccgtacaggcgacatccggtgcagtaaaagcagtattcggtaatgaagataatgcaaaggatgtcatagcatatctggcagagtatgaagtcatggaataggagggatggtatgaaaaagggaaaaataggggcaagcctgttgctgttcatacttcttttaagcactgtcatccctgtctatgctgatgaaaaagtaaagaagctttattttgaacaacagaatggaacaatggtatggaatgctgataaaggttcaaatggaaactggttcatgagttttacgaacatggttccgggagaatcttatcaggacagtctggtgattgaaaatggttcttcaaagacttatgaactttattttcagattgtccctttagagcaggcagaattaaaagatgaactgctggaaaagatacagatgacaatcatgcaggacggaaagcaaatctacaaagggaatgccacgggagagcctggcacaaaagatttacagaatattgtacctctgggaacttatacacctgctaaggaatcaacgttagtcgttgaactgacactggatggagacattgggctggaatactgtgaccttctgacacagattgactggaagttcatggtgaaagaaaaggtggattctaagaaggatacatcggttacggaaatcaaaccgcccaaaacaggtgatacgaccaatacgggactatggatatttgttgtgataggttcaatgaccgtgatgggcgtagtaaatgtattccggcacaggaaagagactgctgaaaaacagttagaaaaataatatcgaaagtagggaaaggtttgaaagcgtttatcaaagaatttaaggaatttatcagccgtgggagtgtgctggacatggcagttggtatcatcataggaggtgcttttacaagtattgtaaagagtctggtcgatgatattatcaatcctctgttaggtctttttggcggaatgaattttgacctgcttacaatcagtttaggaaaagacgtagttttatattacggcagattcttaacggctgtcatcaactttctgattatggcactgattgttttcgccatcataaaagtaatcaatcgtttcaccgcaaggtggaaaaatcaggaaataccaaaaaaagaaacaaagatttgtccatactgtcagagtgagatacatattgatgcaagaaaatgcccgtactgtacatcggcaattcaatgagagggacagtctatgaaagatatttttgaggatatgaggaaagcacttggtttggactacatttcagatattccgttggacagaaataaagaatatatcagaatagcgctgaaaagtcttcctatggatgcttattctgagaaagaggtagaagaatttaaaaaatatgcttttcaaaaacggatgatagtaagtcgatacctaaaaaacgatacttaatgcagtaatgcatggatcgaatacaatcatggataagaaaatactggaaatgaatagagaaagctcgtacaagaaacggttttgtacgggcttttttgacgtactccattttgcgaataaaatccgctgttcttctgtccatacagtagaattatcttctgtgaaaaattggattaatgcaatactaaatgcgctacctgcattgcccttcaagaatttcctgttctagagaaatgcatttatatggataaacttagcgggaaagattttaacaggccacaatatcagaaacttctgaaaaaatgcggtccggcgactgctaccagatacgttgatttgatgttacagaagattcaaaaaggtgaatttgatgcaacagatatcataacccatacgctttctttagaagaaggaagccacgcttacagtatttttgataaaaaagaggataactgtattaaagttattttaaagccatgatataagacgcttaatttacccggctgaaggcgatggttggaacaagaaatctagatgacagcgttcaagaagaatttgcgggagataataatacaacgagaaatgaaaatcagaaaacagaggataatatggctcatttcctaaatttaacgtcccagccgcaaattaatagcatgtctgttcatgtgctccttgggattagcgctactgacgctgaacgacagccttcgtccggcattaggcgatatcatccgtcttggcgtgccgatttgctatgcttttgacctgcttttttgctggcgaggtacttacttcccacggttatgtggaaatggcattattatgttgttttagtagcgaatgttaaggaaactgcatagaataaaccatggatgctaaaatgcgagaacatcagtgggactgttgtatgttccataggtgtgtttgctatacttatggatggatcaatctcaaaatagggaggattcttatatgacagccagcaaagacattttggcagatagatatttggctaaatcgtctattcatgaaaatgcaatcattaaaaaaatatctttggtcagcattgtcggaaatattattctttctggatttaaattgtttgcggggatttatggccgctcgggagcaatgatttccgattccattcattctatgtcagatgtaattaccacatttattgcttttttaggagttaaaatatcaaaaaagcctgcggataaagagcatccttatggacatgaccggctggagtgcgtagccgcgctgcttctcggagccattcttctagttaccggtattggcattggaaaagcagggatgcagaatattatcgctggaaattataatactcttgcagttcccgacatgatagcacttgttgcggcgattctgtcaattgttggaaaagaggctatgtactggtacacaaggtattatgccaaaatcattgattctgcggcatttatggcggatgcatggcatcatagatcggatgctttttcttccgttggctctctgattggcatcagcggcgcaatgcttggctttccggtgctggattctgtagccagtgttgtaatatgcttatttatattgaaagtctcgtgtgatatattgtgggatgctgtaaggaagatgctggacactgcctgtgatgcggactatgagaaaaaactggcggattacatcagctctcaggaagaagtaattcgtgttgatttgctccaatccagaatgtttgggaataaggtgtatatagacctggaaattgcgatagaaggcgacaagtctcttcgtaccgcccatttcattgccgagcagattcatgacaaggtagagaaagcctttcccgagatcaagcacattatgatacatgtaaatccggccgggaactgattgttatatctgtaaggagcagaagtagaaattgtaaaagttccgaggatggtgatacatcatctcccggaacttttaaagttattttattactttttaaaatagtcagatataggaaccggaccttccaagatttctctctccacggatagataccggtctcttccagaacgtacagaccattttattaaggttatatgattattttctatttcaatgccagtgatacaccggggatgcacacagcttcccgtgttaaaataatttccctctttcggttgtgaaaacacgggtctgtgcgtgtggccggcgatcagaattgggtagtgctcctgcgcataagacgatagttttttttctacgcgttcctttgctttcctggggcgcccagcacctgtgggatctaaaaagcctactaattcaagatgacgccatatatatcgtaccaggaaccttgctacaggccacagcgtgtcatttaggaggtcgccctgatgtccatggaccaggaatagttcctcttttttgcaaatattttctagaatcaggccttcagaagcggtttcagtcaagagaactttttcacaccgggatgactcgcagtaataggtgccacagtgacgttccatataacctttccttcgttttacaatgtcgtgattgccatacagtagatggagcctgcctgacttgttaaattcagagagtatccaaaagatgtcgctgtgtacctcgacaatggtttttagctgcctgttttcccacaattcatctccgtcacccagttcaatataggtaaagccattctgataataatattgcagggctccgaaacagactgtctgatttgccaggaaattatctcccgcatttccctggccacggtggcagtcgctcataagaatcagtttcgaatcagaatcaaaagggagtacctgggcgtgctggtatatctcatccagtctttttggtgtcgagacagccttcatgggaactacctccttgtgctatcatcaaagtcgcagttgtgagcatggctgcagtactgcctgcaaggatcgcaccgtggatttgacggatggggccggcaaggatggcatggacatacaggagggcaaggcggatccggatgtggttctggcggcgggggcggcagcggattcggggttggatgaggcgggcggccctccagccattcctttatccattcaaaagcgtcgtaaacgcctcttgtgtaaagcgagtcaataaataatttatagagttctggaaccatagcctttatatattccagtttgtcgagggtctggctgtatttggctgtggtgaattcatataatttgcaattattactgtttatctgctgtactaaggcttcagcagcctcatttcgtgacagaggctgtggggaatgaggggcagcataatgaatagatacggtctttcttcctgaggaatattcctttttggtgtatccgatttcgattaatgcctttaggaatgcatctttcataccctgatccgggaatacgatttttgcatccatagtcagcatatccgtatcagaaaattgtcctaatttaaatcctgtaagccaccaatgcatggcactgcgttttagtatgacttttccatttctgcgcagtacaaatgaaagattaagcatttctttatttccgatattttcataaaaagtgcctttaaattcgtctgtatccacatcttcgcggattgtattatatactccgatttctcctccagtcgtgattccatactggcctttccagagttcgataagccagcgctttcccctataggagaaagtaattggttcacagtccataatcatattaaacagcggggctgcctcatcatagaggcgacagtatcctacttgtctctgccagcagttcataagggaataaaaataatcgccttttatttcgtaagcaaaaccagtttctttgagatcggcatttaattccctctgctggcgtaatttatcgggatccggatggaatcgatggcttcgaatccgccagattataagaactacaattacagcagcgagaatagccgccccaattattaataatattgtgggcatgataagcgtcctttcttttcatgttaatatattctattcttcgtcattttttttgtgaaaacgactggctaagtctaggttttacagagggtagcagactgcaaaaatggacaataaaaggcagcagacaaaacattgcctgttatggaaacacctccgcaaatcagtaaaaacgtaagcatgaccatgatgggaagccatacagagtctatcggcagaccgagggatatcgcttttatcagtttgattccctgggtcaatggcagtaaatcagatgcgcccaccatcatgccaatgctgaatgtggtaccgccaggagcaaagcctatcagaagaaaattctctatgtccacaagaattcaaattaagatattaatatagaggatgtttcagacactttggcaaaaaaataaaagcgagagtggaatttattctgcattatgttatactaaaaagatcagaggaatggagagattaaatgaaacgaatttttttggtcgaggatgataaagaaattgccaagaaccttgcgcttttgcttcgcacggaaggatttaacgttacccacgcctcctcgcagagcgaagccatatccgttcttgacggaaacaggtttgatctggcgctggtagatatttccctgccggatgggaatggtttcacggtctgtacggagattaagcaggcgcagaatattcctgttatttttcttacggcttccggagatgaggcaagcgtggtaacagggcttaatatgggagcggatgactatattatcaagcctttccgcccacgcgagctgaccgcgcggattcgtacggccttgcggaaatacggacactcgccatcggcttttgagatgtgcgatctacatgtggataccgccagcggcgttgtaaaaaaaggcgggcgggaggtctttttatccgccttggaatatcggctgctgcttatatttattaacaaccctaatgtgatcatcacgcgggaccggctgttggacgaattgtgggacgcggcaggcgagttcgttaataacaatacccttaccgtttacattaagcgtctgcgggagaagattgagaatgatcccggaaatccgcagatcattctcaccgtccgggggacaggataccggctgggaggtagttatgtttcggaatagagaaatacggtggtttgctgttttatttatttttattaccgcgacctcagctgcggcaggatttgccatccatccggcagcagggatactgacctttgtttctgccgctgcttttggagtggcattttttgtgtttaccagatctcggtataaaagcatagctcagatatcagaacagatcgatctggtgcttcataatgcggatcatctgtttgtcagcgaggcccaggaaggcgaactatccattctgcaaagcgagatcaccaagatgaccctgcgtatccgggagcagaataatgcgctgaaaggggagaagaagcatcttgctgattcgcttgccgatattgcacatcagcttcgcacgccgcttacttctgctaatctgatcctgtcgttgcttaaaaatacttctgatgagaacgagaggaagaatctgctgcgggaagtggaaggcttgttcgtgcagatggactggctggttacatccttgctgaaactttcccggctggatgcaggcatcgttgtattccagcgtgaacagatggacgtcggtaatctgatagatgcctctatccgtccattgctcatatccatggaactgcataatattgacttacagacagagataccggaaggggtagtcatagaaggggattcagggtggctttcagaggcaatccaaaatatccttaaaaactgcatggaaagtgcaggtgacaacgggaagattgaaattatgtgcgaggataatgcgctgtttaccgagatcactttgcatgacagcgggccaggctttgaaaaggaagatctgttctgtctgtttgaccggttctatcgtgggaaaaatgcgggcgcggtaggctatggaatcggactggcgctgtgcaagacgattatcaaccgtcagggaggcaccattgccgtaaagaatcatccgcagggcggcgcagtattttccattcgtttttcaaagtgatgaatttatatatgaaatgtctcccataatggctgtcgatttgctagaatatatttaaagagaggatataaacagatatggatgagataaatcgttacaaagagcggctgcagattgcattgacagcggcaaagatatgtattttcgaagttgatcttttacagcagctttacacctattttgaaaatgcggaagttatttttggcatttcaggtgaaaagatattaaaagatgtgcagccttttagcaagctggagccggtagaataccgaaaagcggcaagcgcgtatttttcgcatccggaggacgaagcggtgatagagaaggccttcaaggatatcctaagaggcaaagaatcaacctatgaagcacgcatgagggctggaggatcaggatatgtgtggtgcaggatccacgcaacgcctatcatagaaaatggagtaccggcaaggatggtaggcgtgatcgcagatatctctgatcttagagaacagacggaaaatctgaaaaaggccgttaatatggatgcatttactgaattatttaacaaggagtatgcaatcggcctgataagcgagattttaaggaaaagcaaggatttaaatcatgctctgctcatattagatattgataattttaaaaattataatgatacctttggccatagcgagggggataaggttatcaaggcagtatccagaaagataagagatacatttcgggaaacggatatcatgggcagattcggaggcgatgaatttattcttttggttagggatatcaaaaacatgcagtggcttaaccgcaagttatccgatcttacatgctttcaagtgggagatattacttgcactaccagcattggcatctcactattcccacaggatgcagcgagattcaaggaattatttgcaaaggccgatgccgcattgtaccaggcgaaggcgcaaaagggaattttcatatattatcatgagtaacagcggcaattctaaggagggcctgttcttttttctgttcttattccaaggcaacacaaatcatgactccttaaccaaatagaaggtttgtattttatcgtttttgtggtatagttacattaatgaattcgactgtgggaaacggtagaaaaaggaggattaacatggcattttattatgaggagccatctaggacattcagcgagtatcttttaattccaggctattcttctgtggaatgtgttccatcgaaagtaagccttgagacgccgctggtgaagtttgagaagggtaaggagccggaactgtcgatgaatatccctatggtttcggcaattatgcagtcggtctctgacgacaggcttgcgattgccctggctcaggagggcggtctgtcttttatctatggatcgcagcctatagaatctcaggcagagatgatcgaaaaagtcaagcggtaccgggcaggattcgtagtaagcgattccaatgtatcggcggagatgacgcttcaggatgtgctcagactgactgagcagaccggccattctaccatagcggtaacggaagacggcagccccaacggaaaactgctgggaattgtaacgaacaaagattacagggtaagcaggatgactcctgatacaagggtcaaagatttcatgaccaagttggatgaccttgtatatgcgcaggaagagactacgctgaaagaagcgaatgacattatttgggaccataagattaactgccttcctttggtcaataagaaccaggaactggtatatctggttttccgcaaggattacgatacccataagaagaatgagtatgaattgatcgatagttccaagcgttatatggtaggcgccggaattaataccagggattatgaagagcgggtgcctgcactgcttaaggcaggcgcagacattctgtgcatagacagttcagaaggattttcagagtggcagaaattgaccattgactatatccgcagaaattatggagaccgcgtgaaagtaggcgcaggcaacgtagtagatgcagaaggcttccgattcctcgctgaggctggggcagattttgtcaaggtaggaatcggcggcggagccatctgcattacccgcgagcagaagggcatcggacggggacaggctacagcactcatcgaggttgcaaaagccagggatgcctattatgaagagacgggaatctacgttccgatctgttctgacggaggcattgtgcatgattaccacattacccttgcacttgctatgggggcagactttattatgctgggcagatattttgcaagatttgatgaaagccctacaaaaagagtgaatattaatggaagctatatgaaggaatattggggagagggaagcgccagagccaggaactggcagagatatgacatgggaggagataagaaactgtcttttgaagagggcgtagattcttttgtcccttatgccggaagcctgaaggacaatgtaaatcttacgctgagcaaggtaaggtcaacgatgtgcaattgtggagcgatcaatatacctgagttacagcagaaggccaaaattacgctggtgtcttccacaagcatcgtagaaggcggcgcgcatgatgtcatgctcagagataagagatagaagtgcgaagtagagcaaaaaagagtaggtatatcgacatgtcgaatgattagtgcgggagagaatatggaatatacaccgtctgaaagcccgccagaaccgaacgttggaagaggcgcacaggcttgagaaagaactgacgcataagatggctgcgtgcgaggcagccgcgtaaaaagggcaggactcttgcatttgcagggactgttctttttgtgtgcaggaaaataaaggggattacaaagactaggcttgacatgcaagtcttacaagtgtaatattaacgaaagattacttttgtaagaaaaggaggcaaaagatgaaaaaagcgattttggtcattgtattcttactgcttgccatggcaggatgctcaggcaaaaacacgaaggatagtcctaaggagcatgcagataaaaagccggttgaaattgcaaagggttaccaggatatatatgataaagcctgtgaggatggaaagttagatgatctggcaactatccgccaaatcgtagaacgtctgggagaggatggacttgtggcagtggacgctaagaatctggttgatatggaaaacgcgtcgcaggctgaagcgttctgcaaaagagccagtgaaggaaaggaggctgcccagacgatcatcgccgtaaaggacgatggaggatttatacgctatgacctgcaggctttggatggaactttaaaggtgcggcaggggtatgtcacatggagcaaaggcgagccagtggaaaaggggacggatgaatatcaggcatatgcttggagttattccagcaaagggtacctgttttttgaaaagtaccagccacccgggtatgatggattttcagggcatacggctataagagtgaagcccctggatcaagattgccgggagttgaaccagaaatatatcattccggtagggtactatctgaataatttgtttctggaggactggagcgagaatgattatggcgatttgaatttctatgacattttcgagcctatgtatcagatgaagtatggaaagagactggatgtggaatttgcctttacaggaaagacatacaatgtgccggaaaaagaattcgaagatgtcttcctgactttttttcagattgatccagccatgctgcggcaaaagaccacctatgatgaagtcagtcatacttaccagtacaggcccagaggaatgtttgactttggctctactccggatattccctacccggaggttgtggcttatgaagcgcaggaaaatgggacgatcaaactcgtcgtggatgcagtatggcctgatcggaatatggacaaggcgtacagccatgaagttgtggtacgtcctcttgatggtggcaggttccagtatgtttccaaccatgtgattgactctgaggataatgctgagcctatctggtatagggagaggctcagtgatgaaaagtgggatgaatattatggcgattaagactaagaatggagcttattatgtttagttccatacaaaaggagatatttccgctataataacgcttgagaaaggaattaagttgattctcaatatgttggaaaaggacgaaggcagcattcgggtatatttttgcccttcaggaaaaaatgatctggtgtgttgctacagaaatagaaaatactaaatgtgaaggagttgcggatattaaataaatttacaggaatagtattatttttaaaagattttatgttatactgaatatcgctatgacagtaaattcattcaaataggatgaagaaggcatgcagaagaatagaaacgtgtggaggagaagatgccgacaataggaacgcatatgtctattgccaaaggaattgccaaaacggctgaaaatgtggtagagatgaaggccaataccatgcagatattcagccgtaatcccagaggctcgaattataaaacctatacggaagaggagataggaagattccaggagatccgtcgcaaaaaccagtttggccccttgctggctcatgcgccatatacgatgaatctggcaagcgataaggagaaggtctatgaatttgcatgtacggttatccgtgaggatatcgcaaggatggatgccctggggattgaaaatattgtatttcatccgggaagccatacgggcatcggcatcgaggcaggaatccgcaatattatcgcaggacttgaccaggcaattaccggggatgagaatatcatggtgctgctggagactatgactggaaaagggacggaaattggagcaaagttcgagcacttaagagcaatccgggatggagtaagacatccggagcggattggaatctgcctggatacctgtcatgtgtttgccgccgggtatgatatagtaggaaatttggatggcgtattggaagagtttgatagggtgattggcctggatttgctcaaagcagtccattttaatgacagcatgatgccttttggctctcataaggatcggcattccacgataggagcgggcgagattggcctggagccgctgctaagggtcatgagacatccggcgcttaaggaacttccgttttacttggagacgccgcttgaggatgcagagcacaaaatagagatagagatgatacgccagaaactctaaacgtggaggaaggaaatgggagcgacgttaaaaataatagcacgtattcacacggattttccatccaaattcggcattccacgccaaagcggactggcggatacacatggattcataatatttgagccaaagttcagaaacccggattccattaaaggaatcgaagaatattcaagactttggctcctttgggaattttcagagaataaaagagaagcatggaatcccatggttaggcctcccaggctgggaggaaacaagagagtgggggtattcgcctcgcgttccccattcaggcccaatcctatcgggctgtcctgcgtagaactggaacgggtggaggcagagacgcccaagggtcccattctctatatcaagggggcggatctgatggatggaacgcccatatacgatattaagccttatcttccctatgtggacgcctatccccaggcagaggcaggctttgcggatcgggtaagggattattgcctgacggtggaattcccggaggaactccttaagcgggtgccggcagagaaaagagaagcgctgagacagatactggcccaggatccacgaccatcctaccaggaggatccggaacgaatgtatggaatggaatatgcggggtttgagatacgcttccaggtggaggagagacggctggccgtacgggatgtctatgcaaaagcggacaggcaggatatagtttccggcgtgtgaatggaggaattcgtaccaaaaatgggtttacacgaacaggatacaggtatataatggtagccagcagatgatgttactgcaatcacctattcaaaaaagaataaagaagtctttgtggcagggtgcaaatccctaccgatggtatagtccatgacccgcgcaagcggctgatctggtgacctttttgaggaattccagaaccgacggtatagtccggatgagaaaagacattttctgcgtaattacgcccgggacataagtatatgtgccgggttatttttttgaggaggattcagtatgaaccagatgaaagaaacaaccaatgtaactacaggagaaaacctaaaaagccgtgatgacgccaggacgaaggtaaagaagattgcgtttatcggtctgatgggggcggtcagcgcggtgctgatgctatttcgcttcccgattccgttcatgcccccgttcttatcctttgatctgtccgggcttatggagatgctgggcggattcatgttcggccctatggcggccgcatgcatcattgtcgtaaagatcctgctgcagcttgtgatgcagggaagcttctccctgggaaccggagaattgcagaatctgatcttaagttgttcttacgtgcttccggcactgattatctatcacaggaataagacgaagaaaatggcaattactggtatggcggtgagcaccatattcgtatcggtgatggcggtatttaccaacctgtatctgatcattccgttctatgtcaagttatttggcatgtccatggacgacatcattacgatgtgccggacggtaaacccggcgatgaagaatgtaaccactatggcggtgtttggactgcttccatttaatcttatcaaatacggcgttacgtctctggtgacgtttatcgtgtacaagaggctgagccgtgtaataaaaggaattataagcaaataaaggagagaatatcatgaaatttacattggacaaagacattacttatgagcaggcggtgggccgcatgttcgaaatgcttggcaacagccagatcatggcgctggcatccagcctgaacgactacgttatggtgcgcaatgtaagctgcctgttctatgacgagaagatctactttaagacggacaagaacttccgcaagacaaagcagctgcttgagaatccgaatgtagccatgtgctggagcggcgtacaagtagaaggaactgcaaagaataaagggctcgtggtggacgagccgggacagagatttgcaaagggatatgagaaatacctgtggcaaagttacaacaagtatagccacgaggatacggagattctgattgaagtatcgcccaagtatgtagagatatgggacaccagcgatgatgggtatgcattccagctttttattgattttgagaagaggcagatccaagtaaagccgtatgatcagaagtagacaggaaggctctgttttaggaccgggaaaccggaatcctgaatagagccttttttatttggctgaaaaatgcacttgcaatataccctatatgggtatataatgtgcttgtaaagcgaggtggtacagatggaagaaataaaagaatgctgtcataagaaaaaagagcgttctgagaaggagtataaagatttgattcaccgcctgaaccgtattgagggccaggtacgcggaataaaaaagatggttgagagcgatacttactgtacggatattctggtacaggtatcagcggtcaatgcagcattgaatagttttaacaaggtgcttctggcaaatcatatccggacctgcgtggcgaacgatatacgggatggaaaggaagagaccattgatgaactggtggcgacgttgcagaagcttatgagataggaggcagagtatggagcaatatacagtgacgggcatgagctgcgctgcatgcagtgcccgggtggagaaggcggtttccaaggtgccgggggtaaccttttgttcggtgagcctattgacgaattccatgggcgtggaagggacagcagggcaggcagacatcgtggcagcggtggaagaggctggctacggcgctgcgccgaaggcttccgaggcgaagggaaaggccgcttacgggacagcgacggatgatttcctgaacgataaggaaacgccgctgcttaagaagcggctgatcgcatctttgtgctttctggtgccgctgatgtacgtgtccatggggcatatgatgtggggctggccgcttccggcatttatggcagacaatcatgtggcgatgggattataccagctgatatttacggctgcagtcatggtgatcaaccagaagttttttatcagcggctttaagagcctgtggcaccgctcgcccaatatggataccttggtagccctgggggcaggagcatcctttgtctacagcacctatgccttattcgcgatgacggatgcccagatgcacggcgacatggcaaaggtaatggattacatgcatgaattctattttgaatccgccgcaatgatcctgacgctgattaccgtaggaaagatgctggaagcccgttccaaagggcggacgacggatgcgctcaagagtctgatgaagttggcgccgaagactgcgacgatcatcagagacggcatggaggcagaagtatccatagaccaggtgagaaagggagacgtctttgtagtaaggccgggcgagaatattcccgtggatggcatcgtgctggatggcagcagcgcggtcaatgaatctgcgctgaccggggagagcataccggtggacaaggaagtaggagacacggtgtccgctgcaaccttgaatcattcaggatttctccggtgcgaggccaccagggtgggggaggatacgaccctttcccagattattcagatggtcagcgatgcggcagccaccaaagcgcccattgccaaggtggcagaccgggtatccggcgttttcgtgccagcggtaatcggcatagcggcgggaaccatcctggtatggctggttgcgggacagagcataggttttgccctggcgagaggaatctcggtgctggtaatcagctgtccttgcgcgctgggtctggcgacgcctgtagcgatcatggtaggaaatggcatgggagcgaagaacgggatcatgttcaagaccgccgtttccctggaagaagcaggcaagatgcagatcgtggcacttgacaagaccgggacgatcaccagcggggagccaaaggtaacggatatgattccggcatctgggattacagaagatgaattgcttcggatggcctacggactggagagtaagagcgagcatccgctggcccatgcgatcttggcgctggcgagagaaaaaggtctttccgatgggcatgaggtggcggaattccatgcggttcccggaaatggacttaccggtcggatgggcgaggatgtgctggccggaggaaatcttaagtttatcggtgataaagcatcggtgacagaagagatgaggcagaatgcagaacgtctttcagaagatggaaagacgccgctgttctttagcaggaacggagaactggcaggaatcatcgctgtcgcggatgtcatcaaggaggatagcccgcaggcgatcaaagaattgcagaatatgggaatccacgtagtcatgctgaccggcgacaacgaacgcacggcaaaggctatcagacggcaggccggtgttgatgaggtgatcgcaggcgtgcttccggacggaaaggaaagcgtgatccgatcattgaaaagaaaaggaaaggttgccatggtgggggatggaatcaatgatgccccggctcttactagggcggatattggcatcgccataggcgcaggcacggatatcgccattgacgccgcggatgtggtgctgatgaagagcaggctcagcgacgtgccggcagccatacggctcagccgggcgacccttcgcaatatccatgagaatctattctgggcattcttctataatgtgataggaatacccttggcggccggcgtgtggtacccgctgcttggatggaagctgaaccctatgttcggggctgcggccatgagcctgtccagtttctgcgtggtcaccaatgcgctgcgcctgaactggttcaagatgcgtgatgcaagcaaagataaaaaaataaaaaccaaaaagaaagaggaggagacaacgatggaaaaaaccatgaagattgaaggaatgatgtgcggacactgcgaggcaagagtaaagaaatgcctggaggcccttgagcaggtggaggaagcagcggtaagccatgaggaaggaaccgcggtcgtaaggctgaatggagaactggcagacgatgtgctgaagaaggcggtggaagatcaggactacaaggtgctggatatccagtagtaaaaggcatttctaaaaattaaataaacagtcagacagtcatattgacacaaaagcattttcttgctaggatagccatatggttcaaaatagaactaaatatggaggcgagaaaatgctttttgatttgtgggatggattatccctgtttaaaaaaatctatgaccagtcattggagccggtctgcaaaaaataccagttgacccgtatggaactggacatccttttgtttctggccaacaacccgggctatgatactgccaaggatatcatcgagcgccggcggctcaccaaatcccatgtatccatgtcgctcaaggacttagagaggcgggatctggtgcaaaaggaatattatccgggcaaccagaagacggcgcatctgaaactgtcttcggcatccatccagatggtggcagaagggcagcaggcccagaagaagttttttcagacggttttcagggattttaatccggaagatgtaagccggatggaggattacttcgaaagaatgcggaagaatatgcagaatgcgctgaaggaggaattatagaatgcttacgaaatttattgtatgttttatcgcagggatcggggcaggcctggggaccggatttgccggaatgagcgcggcggcggtgataagcccgatgctgattaccttcttgcatatccccgcctatgaggctgtgggaatcgccctgtcaagcgacgttttagccagcgcggtcagcgcttatacttatgggaagcataagaatctggatatcaaaaatggaatcgtcatgatgatttccgtgctgtgcttcaccctggtggggagttatatatccagcctggtcccaagccatgccatgggcggtttctccgtgttcatgacgctgcttctgggaatcaagttcattgtaaggcccgtcatgacgacaaaggagtctatggaggctgtcagcccgaagaagcggtttatacagtccatattctgcggcatgctgatcggattcatctgcggatttgtaggagcgggcggcggcatgatgatgcttctgattctcaccagcgtgctaggatatgaactgaagactgcggtagggaccagcgtgtttatcatgacgtttacggcatttaccggagcggtgagccactttgccatcggcggggcgccggactggtggtgtatggctttctgcatcctgtctacatttttatgggcaagggtggccgccaagtttgcgaataagacgagcccgatcatcttgaaccgtgcgacaggagtcgtgctgtccgttcttggcatttctattattgcagtgaattacctggcttaaaaatgcctcttttggtcaataatgtcaataaagacgtttattgaggaaagaggaagaataatgaagacatttgaagaattatataaggatgttcttagccggaagatatctcttaaggagccgcttccatcggaatataatccgctgcatctggactgcctgctccatccaaagaattatgccccggtcataccttctgtcgagtgcgaggaatgtgcctatgagcgtgcctgccagagaagctgcatctttgatgccatcgaagaaggagaagacggaaaactgcggatcaatccctcgctttgcacaggctgcggcgtgtgcatggatgcctgcaaagaagaaaaactgactgccagcaaggatgtactacctgccatgaaggcagtccgggaagccaaaggaccggcctatatgatggtagcgcctgcatttctggggcagtttgatgaggcggtaacgccagggaagctgcgcagcgcgttcaaggcccttggatttacaggaatggtagaggtggcgctctttgcggatatcctgactttgaaagaagccttagagtttgacagccacgtgaaggagaaaggggattatcagctgaccagctgctgctgtccggtgtggatctccatgatccgcaatatctaccatgaactgatgccccatgtcccgggagccgtatcgcctatggtggcgtgcgggcgtatgattaagaggatgtatccggatgcggtgaccgtatttgcagggccttgcctggcgaaaaagaaggaggcccgggaaccggatatcgctgacgcggtggattatgtgctgacattccaggaagtgaaggacatcttcgaagcagctgatattcatccggaagaactggaagatgaccagaaggaacacgcttctaaggccgggcggctttatgcaagaaccggcggggtcagccaggcggtgtcggagatggtggaacagttaagacccgaccggagcatagccgttcatgctgagcaggccaatggcaccaaggaatgtatggcaatgatcaaacggatccagaataaggagacggatgccaatttctttgaagggatgggctgtatcggaggatgcgtaggaggcccgaaagcgatccttcacaaggaagagggaacaaaatttgtagatgaatacgggcaggaggcgccttttaagactccgcttgagaatccttatgtacggaaggtcctgaaggaattagggtttgagacggtggaggatctggtgacagacgattctcttctgaccagggatttttcggctgccaggtaggtaaaatgtaaaagttgtggtatgatataggggcacgcataagagaaaggacaatgaaggaagatgaaccgatactatctcgccccgctggagggcattaccacgcacatttacaggcgggcgtatcacgcctgcttccatcctatgaataaatattttacgccgtttctggtgccccacacaaagcggggattcaatacaagggaattaaatgatatcctgccggagaataatgaagggatgaggctggttcctcagatcctgaccaatgatgccaaagggttcttgcagaccgtcgagaaactagaagattatggatacgaggaagtcaatctaaacctgggctgtccttccaagacggtagtatccaaaaacaggggatccggattccttgccatgcccgatgaactggaccggtttctggatgaaatctacagtgggactcaagtcaggatatccatcaagaccagaatcgggaagcatagcccggatgagtttggaaggctgctggaaatctacaaccagtacccggtagaagaattgatcatccatccccgcctgcagcaggacttttataagaatacgccgaatttggaagtatttgcggaagcggtgagagaaagcaggaatccgctctgctataacggagacatattttcggtgacggatagggacaggataaaggagagattcccggaggtaaagacctacatgatgggacgaggaatccttgtgaatcccgggctggcaggggaactggcaggcgaagagccggcggattgggacaggattcgaaggttccatgaccagatctatgaagattaccaaaggatcagcatgggagataagaatgtgctgtttaagatgaaggaactctggtgctatctgggacatcattttccgggctgtgaaaagcagcttaagaagattcggaaggcagagcggctggaccgctatgaagccgcggtggcggaaatcctgtaagaggctgccgccgcatcttgacaaatcgtgaaggatacggtatatttaatagcgtaaattgaacaggggagcctatggataggctgagaggaagttgcgaacttcgacccatatacctgatttggataatgccaacgtagggacggatgtgaattgtttgcggaaggtgccttggcattttccgctttttcgtatcataggaagttccgcttctttgttcatttgcaaagaaaatgatatagcaataccaatgtgagtgaatgagagttcatgaaggggtgcaccaccgcgggtgtatttctttcatgaactcttttttgccgcaatggagagagcgctgttgcagcaagacttgaattttggaaggagggtggatgatggtaaaagtgaacggaaccgaaagagaatacaggcccggcatgtcggtcttacagctgttggaagagatggggtattccatcacgcgtgtggcggtggaaaagaacgggggaatagtcccgaagaaccggctgtcggatacgtaccttgaggatgaggacagcctggaagtcgtaagttttgtaggagggggctaggagatggaggaaaagagactgaccaaagaagagatcaggcaggcgctgactaagcgtcacacgcagacggtccaggaaaggctggagcgtgcaagagtggcgattgcgggtcttggaggactggggtcgaatgtggcgttttcccttgcgagaatcggggttggacatatccacctgattgatttcgaccgggtagacatcaccaacctgaatcggcagcaatactttatgcgccatatcggtatgtataagacggatgcgctgaaggaggaactggaacagatcaatccttatctggagatcataacagatcgcgtcaaagtatcccgggagaatcttgcttccttatttgccgaagacaagattgtctgcgaggcctttgacgacccggaggcgaaagccatgctggttaatgggatcctggagcattatccggggaaacttctggtggcggcttccgggatggcaggatatggggccagcaatgagatccataccagaaaggtgggaagccgattttacctgtgtggggacgagacctcggaagcaggcggggatcgggggcttatggctccgcgggtggccatctgcgcggcccacgaggccaacctgatcacggaatatattatcaatcaagaaacttagtaggaggagacagacatggaacatatagcaaacgatgcatttgtacttggaggacatacatttgaatcaaggtttatcttaggctccgggaagtattccctggaactgatccaggcggcagtcgaaaaagcgggcgcgcagattatcacgctggctcttcgccgcgccaatgaaggggggatggcaaacatcctggactatatcccaaagggcgtgacgcttctgcccaatacgtcgggggcaaggaatgccgaggaggcggtgcgcattgcccgcctgtccagagaattaggctgcggcgacttcgtgaaggtggaggtgatccatgattccaaataccttctgccggataactatgagaccataaaggctaccgagattctggcaaaagaagggttcgtagtaatgccttacatgtacccggacttaaatgccgccagggacatggcaaacgcaggagctgcctgcattatgccgcttggcgcgccgattggctccaacaagggaatctgcacgaaagaattcattcagatactgatcgatgagatcgacctgcccatcatcgtggacgccggaatcggcaggccttcccaggcctgcgaggcgatggagatgggggcggctgccgtgatggccaacacggcgattgccacagctggggatataccggctatggcggaagcattcaagaaagcaattgaggccggaaggacggcatatctgtcaggcatgggaagagttatggacaaaggcgccagcgcttcttccccattgacaggatttttgcaggattaggaggcagttatgagtacagacaatcatgtgaacgaaagcattttaaacagcgatatcaaggaatggcagaaaaagaaccgtatcgaccatatggcctatctgccggggatggaagtcctggagtcagaggtgcaggcgcaggtgatcgaatcgatgaatgcctatgattatacgatatatacggaaaaggacatacgccgggcgttggagcatgacaaccgtacgccggaggattttgcggcgcttctgtcccctgcggcgctgccgcttttggaggagatggcgcagcgtgccagaatcgagaccaggaagcattttggcaatggcgtctatatgttcacgcccatctacatagccaattactgtgagaacttctgtatatactgcggatttaactgccacaacaagattaaccgggcacagttgaacgaggaagagatcgacaaggaaatgcaggagattgccaagacgggcctgcaggaaattctcattcttaccggcgagagcaggagcaagtctaccgtggaatatatcggcaaggcctgccggattgcccgtaaatatttcaaggtcatcgggcttgaagtgtatccgatgaattcggatgaatatgcctatctgcacgaatgcggcgcggactatgtcaccgtgttccaggaaacctataattcggaaaagtacgagacgcttcatctggccggacataagcggatattcccttaccgcctgaacgcccaggaaagggccctcaaaggcggcatgcggggcgtgggatttgcggctctcttagggctggatgacttccgcaaagacgcatatgccacaggaatgcatgcctacttgctgcagcggaaatatccgcatgcggagatcgcattctcctgtccccgcctgcgtccgatcatcaataatgataagattaaccctatggatgtgcacgagccccagctcttgcaggtggtgacggcgtaccgcctgttcatgccgtttgcaagcattaccgtctccaccagggaatgtgcccgcgtcagggacaacctggtaaatattgctgccacgaagatctccgctggcgtaagcaccggaatcggggaacatgtggaagatcttgagacgaaaggggacgaccagttcgagatctccgacggacgttctgtagaagaggtgtatgaagatctgctgcatctgaatctccagccggtgatgaatgactatgtctatgtgtaggcctggggttgaggagggacagaagggtatgggaattctcggtaatagcgaggacttttatagccgtgtgatcgccgtgacgaaccggcatctgtgtgccgggccttatctggaacaaatagaaagaatctgccggagacagccgggggcggttatcgtacgggaaaaggatatggggcccgaagattatgaactcctgtatcgccaggttcgggaaatctgccaaacctatggcgtgccgtgtattgcccatacctacgcgaaggcagcgctgcatgtaggaagccgggctattcacgttcctttgcatttacttaaagaaactcctaagatccggggacagtttgatataatcggagtctccatccatgggaaggaggaggcgcttctggcggaaagattgggagcctcctatcttactgccggacatatctttgcgacagactgcaagaaaggcgtggctccaagaggcgtggaattccttgagaatgtctgcgaggcagtttgccttcccgtatatgccatcgggggaatgaaaggggaaataggctgcgtggaggagatgatggcccatggcgcccggggaatctgcgtgatgtcggaatgcatggggtggtaaaagcgggtttggactttacttttttctttgtatgcaatataatagaaaaaaattccatatacaggaatcttaaggaggagtccttttggagagattaaatcaaatcatagccgagaatctgaaagagatacggaaaggaaaaggattgagcctggagcaggcatctgctcttacttctatcagcaagagcatgctcagccagttggagcgaggggaagtaaatcctaccatctctaccgtgtataaactttcgctgggattaaaagttccagtgacggcatttacactggataagcccaagccgttttccaagacgggcaagtccgaggtcgtgccgttaagcggcgatgacggaaggtacaggctctatcccatcttcaacttccgggacggacaggactttgagatattcgatctggaatttgacgaggggggcatgatgccagggaaccggcagatgaacggaaccagggaattcattactgtatattcgggacagcttaccttaagcttccaggatcgggaatatgtattggaagccggggaggcagcctcctataacgctttcgacgattatatctataagaacacaggaaccgggatggtgactgccagcatagtagtccattacccgaattagaaaggagcattgcagcatggagaatcagaagcagcgcgtgtatgacgcattggacaagttgaaaatcaagtatgaggtggtagagcacgagccggtgcacaccatggaagacatggacaggcttggcctgccggaaaagggaaccctatgtaagaatctgttcttaagagattctaagggaaagaggcatttcctggtgacttgcgaggaaagcaagaaggtagacttaaaatcattgggaaggcagctgggaggaggaaacctcagcttcgcttcagaagaccgcctggaaaaatatctgggccttaagcagggcagcgtgtctccctttggcctcatgaacgataccgaccatgcagtagagttctttatcgacaaagacttaagcagatgcaagagtctgggtatccatccgttggaaaatacggccacggtatttttgtcttttaaggatctggataagtttttgtgggatctggatgtagatgtggtgaagattaagttgtgattttagggaagtagtgcccgcctccaagccgcccggtacttcgctggcaatcccgcgaggtgcaggcggtaatgacgcaaaaaatgatttaaggaagtatcatctttaccatgaaaaaggcccttgaagggccttttcttttgccaatacaatgaaatcattctggtaaaccccatataacgcctttatagatgccccctgcgtaaagcgtacagaaacgccggcactcaccgcagaattgccagtaaattgccggtagcccgggagggaggaatcgcaccccctccctcccgggcgtaccaccaacttaccgaattcctacaccaacctgcttcaacgcctttgcaaccgggggaatggagatgatcaccaaggtgatgactgcctcagcgcccagatatccgccctggtacatcgcggaatatgcccagggattcatgccttttggagcaaatgaggcgaagaagataacgccggacaaggtcgagcagaggaaccttccaagaacgcctgcaaagtatccaacctgtaggccgtattttcgattgctgaaaaagcctgacaggccaagagcgccgaaagccaggggataatccaggattacctgggggatggtcagcatatagggatcaacgatgaattgaagcaggccataggcggcgccagccagcagaccatatttggggccgaaccagtagccgatcagacagataaacagcatggacatcaaagtgatagagccgcccattggcatttcccatactttgatgtaggatgttaccattgcaagagcgattcccatagcagaaaaaacgagtttcttcgttgcggcgtgtgttgcgccgctttttgtgatatttgattttgacatattatattctccttccttacgccagcattacccggatcaagttcaagggtctgcgcgtcttcgcgcatctcagccatatcagcgccccatatgggtcttatgataggagtcatgccggaaattgtcaagtaggagagaaagtttatactttttttattgcaagttaggggaatgagaagtagaatagagaaggtattgatagatgaaagtgaggaagcgtatggaacaacaacagaacagacagggtcagggcggccaggtgccacctatgaagccggaaagttatggcaagcggctgtggcacctgtgggggccggtcgtaatatggctggtgatcgggatactcgtaagcatgattgcagagtatgctttgacttctgtgtatatagtaagccattatggcaatgaattgaatcaaggaagcagcctcagccagacgatggaactgatggaaaaggacggggcttctatcatgaatgctgtcgtcaagcagatgaatgcctattctactccgatcaatggagtgcgggctctgatcgtgataccggttatggcattcctgttccataaagacagggcaaaagagaaggcaatgggattccaccccaataaaaaggcgcctatctggaaatatttcgcagtcattgtcatttccgctgctatgtgcctggggctgaataacctgattactatagggaatttctcggcggccagcgaaacttatacagagacgctggaaggaatgtattccgcgccgctggctttgcagatcgcggtattggcaatcatcgtgcccatcagtgaagaactggtatttcgcgggctgctttttaagcgttttagggaaaatggaggattcatgcaggcagcgctgctgtcggcattcgtatttggatggattcataataatatcgtccagatgatatacgggtttgtaattggaatgatgctggcttatctgtatgagaagtatggctcggtaaaggcgccgattctggcgcatatgtctatgaatctattatcagtgctggcgacgaagtacaaactgctggaatggctggcagaagatgttctgcgtatcggaatcgtaacggttgcgtgcgcgtccatagccgccaccatgtttgtgttcatccagagaatagaagagaaaccagatatcccggggaaatccgaagaacatgagaatctggcagctgtataaactgccagattctttgctttcatgaaataaatagtctgattatctgacaatttgagaaaagttacggtttacaagccggggaaaatgtagtatagtaataaaaaattaaatgaaaggactgaatatatgagcggacagagcgcaagcggtcaatgtggcttgtaccgtcccgggtttgaacatgataactgcggaatcggtgcaatcgtcaacattaaagggcaaaaaagtcatagtactgtggcaaatgcattaaagattgtagaaaacttagaacatagagctggcaaggatgccgaaggtaagacaggtgacggagttggaatcttattacagatatcccacaagtttttctccaaagtctgcaagcctctcggcatccttttaagttcacagagagattacggagtcgggatgtttttcttccctcaggatgagctgaagagaaatcaggcgaagaagattttcgaagtaatcgtaaaaaaggaaggcatgaatttcctgggctggagggaagtgccggttaaggcggaggtcctgggaagccgtgcgcgggaatgtatgccctgcattatgcagggattcatcgagcgcccgaaaaaggtggagaaaggcctggattttgacaggcggctgtatgtgatccggcgggtatttgagcagagcagcgatgacacttatgtggcatccctgtcaagccgcacgattgcctacaagggaatgttcctggtaggccagctgcgttcgttcttcgaagacctgcaggatgcggactacgagtccgcgatagccctcgtgcattccaggttcagcaccaatacgaaccccagttgggaaagggcgcatccgaaccggtttatcgtacataacggagagatcaatacgattcgcggcaatgcggacaagatgcgggcaagggaagagaacatggagtcagaatacctgaagggcgagcttcacaaggtgctgccggccatcaatatcgcaggatctgactctgccatgctggataatgccattgaattcatggtgatgagcgggatggacctgccgcttgccgtcatgatcgcgattcctgaaccttgggccaatacgaagaatatgtcccaggagaagaaggatttctatcaatactacgccaccatgatggagccgtgggacgggcccgcgtctattcttttctgcgacggggactgcatgggagccgtccttgacaggaatggccttcgtccttccagatattatatcacggatgatgacacactgatcttgtcttccgaggtgggtgtgcttgatattgacccgggcaagatcgtcgtaaaagagcgcctgcatcccggaaagatgctgcttgtagataccgtgcagggaaaggtgatcgacgatgaagaactgaaggagagatacgcgagccgtcagccttacggagaatggcttgacagcaacctgacagaacttagcagccttaagattccaaaccagaaggtcccgtcctatacgccggaagaatgcaagcgcctccaaaaagccttcggctattcctacgaggaagtgaagacatccatcatgaacatggcgaaaaatggagtggaagggacggcagccatgggaatcgatgcccctctggcggtgctctcgtacaagcatcagaatctgttcgggtacttcaagcagttgttcgcgcaggtgaccaatcctcccattgacgcgatccgggaggaagtagtaacttccaccaccgtctatatcggcgcggatggcaatctgttggaagagagggctgaaaactgcaggatgctgaaggtggagaatccgattcttaccagcacggatcttctaaagatcaagagtatgaaggcagacggattccagatagcggagattcccattatctattacaagaattccagcctggagaaagcgatcgactacttgttcatcgaggtagaccgggcaatccgcgaaggcgccaatatcctgatcctctcggaccggggcgtggatgaatatcatgtagccatgccgtccttgctggcattgtcgggattacagcagcacctggtgaggacgaaaaagaggacttccgtcgcaattattctggagacgggagagccaagggaagtgcatcattttgcaacccttttgggctacggcgcttgtgcgatcaatccctatcttgcccatgagtcgatccggcagctgattgatacggatatgcttcagaaggactactatgcggccgtggacgattataaccatgcggtgctttccggaattgtaaaggttgcgtccaagatgggaatatccactatccaatcttatcaaggagcaaaaatatttgaggcgatcggcctgaaggaagcgtttatagataaatattttaccgataccgtaagccgtatcggcggcatcggaatcgaagagattgcccaggactatgtggcgcgccattcgcaggcatttgacccgctggggctggaagtggatctgaccttgaacagcatcgggcagcataagtccaaaagcggcggagaaaagcatctttacaatccgcagaccatccacatgctgcagcagtccgccagacgcggcgattatgaaatgttcaagaaatatacggatatggtgaatgaggaaggcgcgcacatcaatctgcgtggccagctggaattcaagtatccgaagaaggggattcccgtagacgaagtggagagcgtggattcgattgtcaccaggtttaagacaggagccatgtcctatggctccatctccaaggaagcccatgagacgctggccatcgccatgaaccagctgcacggcaaatccaacagcggcgaaggcggcgaggagattgaacgtctggatacaaacagatgctcggcgatcaagcaggtggcttccggccgatttggcgtgacgtccagatatctggtcagcgccagggaaatacagattaagatggcgcaaggagccaagccgggggaaggcggacacttgccgggaggcaaagtatatccatggattgcaaaaacccgtcattctacgccaggagtaagcctgatctccccgccgcctcaccatgacatttactccatcgaagatctggcccagttaatttatgactgtaagaacgccaataaagacgcaaggatctcggtaaaactggtgtcggaggcaggcgtcggcacggttgccgcaggagtagccaaagcaggcgcgggactgatcctgatctcaggctatgacggcggtaccggggcggccccaagaagttccatccataacgctggccttccgtgggaactgggcctggccgagacgcatcagacgctgatccagaatggccttcgggagcgggtgcggatcgagacggacggcaagctgatgagcggccgggatgtggctattgccgcgatccttggggcggaggaattcggcttcgccacagcgcctctggtaacgatgggatgcgtcatgatgcgggtctgcaacctggatacttgcccggtgggggttgccacccagaatccgcagctgcggaaacgattcacaggcaagccggaatatgtcgtgaactttatgcgcttcatcgcccagaatctgagagaatatatggcgaggctgggagtgcgtaccgtggatgaactggttggacggaccgatcttctgaaagtcagggaagacgccacctccgacagggcggccacgctggatcttaagcagattctgtataatccatatgaaggaacgaagacgccggttacatttaacccaaagaagaggtatgactttgaactggagaaaacgctggatgagaaggtattggtcaaggaattgctgccatctctggaaaagaagcaaaagagaagcatagaagtggatgttaccaatacaaaccggacatttggaaccatttttggatctgagattaccaggaagtatccggaaggactgccggaggacagttacgtggtaaaatgcagtggtgccggaggccagtcttttggcgcgttcattcctcagggactgacactggaactgattggcgacagcaatgattattttggaaagggactttccggcggcaaacttgtcgtatatccgccacgcagcgcaaaatataagcatgatgagaacattataataggaaatgtggcgctctatggagcgacaagcggaaaagcattcatcaacggagtcgcaggggaacgttttgcagtgcgaaactcaggcgcgacggccgtagtggaaggcgtaggagatcatggatgcgagtatatgacgggtggacgcgtggcggttcttggaaagaccggtaagaactttgcggcaggaatgagcggcggcgtggcgtacgtactggatctggacaacagcctgtacaggaatgtgaataagcagctggtaaatatcgagcatgtgacatccaaattcgatgtaaatgaactgaaaggcatgattgaggagcatgtatcctataccaattcccagatcgggaaagagatcctcaatcattttaccggatatctgccaaagtttaagaagatcattccggttgactatgagcgtatgctcaccaccatccttcagatggaagagcagggcatgagcagcgagcaggcaaagattgaggcattttatgcaattaaaggcggaagataggaggcgcaggaaagtgggaaaagcaacaggattcatggattatgaaagacaggataaggcagcggaagcgccaagagaaagaattcggcatttcaacgaattctatacgccgctggcaaaggaagagcaggaactgcaaggggcaagatgcatgtcctgcggcgttccgttttgccagtccgggcagatgatcatgggaatggcaagcggatgtcctctccataatctggtgccggaatggaacgacttgatctatcatggcaactgggaagaggcatactaccggttgaaaaagaccaacaacttcccggaattcacctcccgcgtgtgtccggccttatgcgaggcggcctgtacctgcagcctgaacggggatgcagtcacgacaaaggcaaatgaatatgggatcattgaaaatgcatatgaaaaagggtatgcgtcagcgcgtccggtgaaggtgcgtaccggtaaaaaagtggctgtcattggctctggcccttccgggctggctgctgcggacatgctgaatcggagagggcacagcgtcacggtgttcgagcgggaggataagcctggtggactccttcggtatggcattcccaatatgaagctggagaaacaggtgatcgaccggaaaatatcgatactggaagaggaaggaatcgaatttgtgacagggtgcaatgtaggcaaagaacggaaggcatccacgctccttcgagaatatgacagagtcatcctctgctgtggcgcttccaatcccagggatatcaaagtaccggggagagacgcgaaaggaatctactttgcggttgactttctgaaatccaccaccaagagcctttgggcgaatgaaatgcagttaaaagacggcgattatatttctgccaaaggcaggaaagtcatggtgatcggcggaggcgatacgggaaatgactgcgtggggacctccatgcgccacggcgccaaatccgtgctgcagttggagatgatgccaaaggctccggatgaacggacgcaggataatccatggccggaatggcccaagatctgcaagacagactatgggcagcaggaggccaaggcagtcttcggccatgatccgagggtttaccagacaacagtcaaagaattcaagaaagataaggaaggcagagtgtgccaggctgttctggtgaaactggaagcaaagaaggacgagaagaccggccggatgatgatggcagaagtggcggggagcgaatatactgtagaagcggacctggtgctgatcgctgccggattcatcggcagcgagaactatattaccaaggcattcggagtagaagtgaatgaacggaccaatgtggcaacgccggcaggggaatatggaaccaacgttgcgaatgtatttgccgcaggggacatgcacagaggccagtccttggttgtctgggcaattcgggaaggcagagaagcggccagggaggtggatataagcctgatgggctatacgaatatggacattcaataaggaaaatagttcctgcaagatgttacaaaagtgttaaaaaatgttgcaaattttagtgtaatagagtataatcgattctagatgtaggggtactatgtcaaatgagggtaaataagagtataagaataagtaaaaaggatgattaaaatgaaaaaatttggaacaaggctgctgactgctgtcgttgctagttcaatgattgtgacaccagttttcgcagcgccatcagtcgatgacttgaaggataacaaggcagccaaggaaagcgaagtgtcatcgctgcaggatcagttgacggatatcatgtccaaactgggagatctggaggaaagcctgattgaaaagggcgaggaaattacaaaagcagaagaagatctgaaagaggctcaggaaaaggagcaggaacaatacgaagccatgaagaagcgtatcaaattcatgtacgaagaaggagatacgaccgcgttagagacgctggtgacggcagagaacttctcggatcttgtgaataaagcggaatatgtacagaacgtacatacatatgacaggaagcagctggaggaatacatagagacaaaacagcagattgcagatcttaagacgacgctggaagacgaacagaagaatatggaatctatgcaggctgaatatgagaataaggaaagcgagctgagttctaccatcgaatccaaaaaggcagaagtcgcgaaccttgactctcagattcaggcagcagccgaagcggcagcggcagaagcccttgcagcacagcagcaggcagcggcagcaaataataacaatggcgggggaagtggaaaccgtaataatggcggcaatggcaccaagccagcaccggcaccgaccccaagtggcggcggctcaggcaatacgtccactgcacaggctatcgtaaatgcggcatacagccagttaggcgtgccttatgtatggggtggaacgactccgggagtaggacttgactgttcagggcttacacagtattgccacagagttgcaggtatcagcatcggacgtacttcagaagtgcaaggaggaggcggaaaggctgtcagcaatccgcagccgggagatctggtatgctacggaagccatatcggcatctacatcggcggaggccagatgatccatgcgcctcatacaggagatgtggtaagagttgccaacgtatatggatccccgtggtatagacgttactggtaaatggtaaacgagggaaagtaaacaggagaacttatgagaagaattaagagtgctttgttggtcacggtactgacatgtggattggttgtaacaccggtttttgcagaaccgtcggttgatgatttaaagaaagacaaggaagcagcacagagcgaagttgattccttacaaagcaaattgacggatttgttatccaagatcagccagcttgagggagacctgatttcaaaaggccaggagattacccaggcggaagaagacttggccgcggctcaggaaaaagaagaagagcagtatgaagccatgaagcttcgcataaagttcatgtatgaagaaggcgataccagtgttcttgagacattggtatctgcaaaggatttctccgatttggtcaacaaggccgagtatgtgcagaatgttcattcctatgacagaaagatgctggaggagtatgttgcaaccaagcagcaggttcaggatctgaagtctactctggagacggaaatggacaatctggagaatatgcaggcagaatttgaaagcgataaagagaacctggacgcgacgcttgcaagcaagcaggatgagttaggcagccttgacgaacagttgcaggcggcagccgagaaagcggccgaagagcagagacgtcaggaagaagcgcagcaggcgaacaataataacaatagcagcaacaacaataatagcaacaagaagccgagcggcggcggaggcggcggaagcaatccttcctatgaaggacagggaaatactgctgtagcacagaagatcgtgcaggcggcgtacagccagcttggcgtgccatatgtatggggcgggacgcagccgggagtaggattagactgttccggacttgtgcagtactgccatgcggttgcgggaatctcactgccgcattattctgagtcacagtatgccggaggaagaaaagtgtccagtccggaaccgggagatatctgctggaagccgggccatgtaggcatctatatcggcggtggaatgatgattgaagcgcagcagacgggcaccaatatcatgataagcccggtgagagcgcaaggctatgcaagatactggtaaggaagtatctggaaattgttgaattatattgaaaataactggaaaatgtagtattctgaccttaaggtatgcaggggagcatatgatccaatcggttgtattataaactgataagatgaataattgataaggatgggtgagaatatgaaaaaaagatttgtacagacactcatcacagtttttgtgatgagttctttaattgtaacgcctgttttggctacgccacaggaggatgcccagtctctggagacgcaaaaggaagaactggaggggcaggcggcagatataaacagccagctggtgggccttctggtaagttatgatgccctgcaaaaagatatggctgaccaggagcagaagattacccaggcgcagtcggatctggaagaggctcagacgaaggagcagaaacagtatgaagatatgaagcttcgcataaagtacatctacgagcagggcgatacttctgcttttgaagcgctggttaccgccaagtcctatgcggaactggtgagcaagacggaatacgtccagaacgtacatagttatgacagaaagaaattaaaagaatatgtggaaaccaaggagaaggtagaagcgcttaagacggaactggaagcaggacaggcagatatggaagtgatggccgcggacttaagccagcagcagacgaatcttgaaaatactctggcggatatgagaagccgtattgctgatttcgactcccggcttgcagacgcgaaggcgcaggctgcggcccagcttgatcaattgacggaagccacgcagaatgtagtcgcttcggcgcagaccggaaatggcgggggaggaaaaccttcatcatcgaccaataattccacgcaaaagcctggcaacaataccaataataatgtggctaacaatgggaactccggaaatcaatccaactctcagggcgggggctcatcaaataatagcgcgccgccggctacaaagccaggcaatgcttccctgggccagcagatcgcgaaccggggatgcgaatatgtggggaatccttatgaatatggagggacaagcctgaccaacggaattgactgctctgctttcgtacaggctatccaccggcagttcggcatatccacgccaagagactcctggggacagttaagcggcggaaaggcagtggcttattcagatatcatgcccggcgatgtagtcgtctacagcaatcatgtggcaatctacatcggaggcggcaagatcgtgcatgcttctaacagcaagccataccccgcgggaggtattaagattagttctccttggaactacaggacagttctgggagtgcgcagatactggtaatatcggacatggattatgaatatggattgtataaaaagccttgcatttgcgggctttttgtgctattatattgcagtcgcaaaaaatcacgcatttgtttatccgagatggtgccaaagcttggcgacaagccggtttcaaggatttacacatatgcggaagcaaaaaaccaaatggaggaaagaaacatgagcgttatttcaatgaagcaacttttagaagcaggtgttcactttggacatcagacaagaagatggaaccctaagatggctccatacatctacaccgagagaaacggcatctacatcatcgacctgcagaagtctgtaggaaaggtagacgaggcatatcaggcagtatctgatatcgctgcagatggcggaacaatcctgtttgttggaactaagaagcaggcacaggatgcgatcaaggtagaatctgagcgttgtggaatgtattatgtaaatgagagatggcttggaggaatgcttacaaacttcaagacgatcaagagcagaatcgcacgtctgaaagagattgaaagaatgtctgaagacgggacattcgacgtactgccaaagaaagaagttatccagttaaagaaagaatgggagaagcttgagaagaacttaggcggcatcaaggaaatgaagaaacttccggatgcaatcttcgtagttgatcctaagaaagaaagaatctgcgtacaggaagcacatacccttggaatcccgcttatcggaattgcagacacgaactgcgatccagaagaacttgactatgtaattccaggaaatgatgatgcgatccgtgctgtaaaattaatcgtatctaagatggcagacgctgttatcgaggcaaaccagggaatgacaggcgatgaagtatatgatgaagctgctgaggaagcatacgaggaagcagtagaagaataagcgattcatttcaatactaatatatggaggaaattaaaatggcagttacagctagtatggtaaaagaattaagagaaatgacaggcgcaggaatgatggactgtaaaaaagctcttaacgagacaaacggcgatatggacgcagccgtagagttcttgagaaagaacggacaggctaaggctgagaagaaggctggaagaattgcagctgaaggtatcgttatggctgaagtaaaagatgataaagtagcagcgatcgttgaagttaactctgagacagacttcgttgcaaagaatgctgagttccagggatttgtaaaggctgtcgtagagcaggcaatggagacggaagcagcagacatggatgcattcatggctgagaactggaaggaagatacatccaagactgtaaaagatgcccttactgagaagatttccgtaatcggagagaacttaagcatccgtagatttgagaaagtcgtatctgatggatgcgtagtcgcatacatccacggcggcggacgtatcggcgttcttgtagaggctgacacagacgtagtcaatgatgagatcaagacatgcctgaagaatgtagcaatgcaggttgcagcgatgtctccgaagtatgtatcccgtgaagaagtttcagaagaatatatggagcatgaaaaggagattcttctcgcacaggcaaagaaggagaacgaggaaagcaataagccaaaaccggacaatatcattgagaagatgatcgttggacgtctgaataaggaactgaaagagatctgcctgcttgaccaggtatacgtacaggacggagacttgacggttgcgaaatatgtagaaaaggttgctaaagagacaggcgctaacttaagcgttaagaagttcgttcgtttcgagacaggcgaaggccttgagaagaagaatgaagactttgctgctgaagttgcagctcagatgggaaactaatttatcaattgtaaggctggtaaaaagcgaattaaatagcatatttaagcagtttctggatattttgacaagtgttataaactactgtaaaatctcacaaaatattgtgctattttgggtacggattgggtagggtattgggtaaaaaaatttacccaaccttttaacgaggaatttgcttgttgtttaaataaaatagaaagggaacgctgtgagcgggggggaatgttatccttatttataataattgcacaggaggaaaggtgttttgaagaaaagaattattagtattttactatgcgctgcaatgtgtgtgggaatggttacagcgtgtggctcaaagaaagcggataaggaggctgatacatctactgacgagaaggataaagtgataactgttgcagcaaatggttcattttatccaatcatctatacagatgacaaaggaaatttaactggttttgaacacgatgttatggaagaaatcggaaaaagagctggatatgaagttaaatttgaagtagtaggtgattattcagcaatgtttgagggactggattccggaaaatatgataccattgccggtcaggtctctgtaacagaagaaagagaaaagaaatatacatttagtgatgtatatggatataatgctattaaattagcagtaagaggtgatgatccggcaacttctattgaggatatgcagggacgaaaggtatgtattgagtttggaacagttctggaagatgcattaaataaaataaatgacacattcccggatgataagaaaatggaacttgttacaacagagggaaatatttatgacgagttaaaagtcggacattatgatgcattcccgattacagtattatcttttgaccagattaatgaaaaaggtgagtatgatttcaaattgattggcgatcctattctgattgataaaaatgcgttcccatttgcaaaagatgttgattcagatatgataaatgcagttaataaagcaattgaagaaatgcaggatgatggaacaatgtcagaattatcagagaaatattttggcagagatatttcaaaagaagagattactgaatagataatgaatttagaaaaggcagtcataaagactgtcttttcttgataaaggagaatgagatgaattttgatacacaattttttgtttcaatatttccgaaactgatgttgaaaataccgtacacgttatgtcttgggtgcatcgcatttgcaattgcatttgtgttaggactttttttggaaatttgttttacctcaagattcaaaatcctgagaacattggcgggattatatatctcttacttcagatcgacgccatatattacacagctatttattttttattttggattgccacaaatatttcctgttatgagaaatctggtcggaggaacagttctggttattacaatagcaatgaattcagcagcatttatttcagaagttatccggggaggacttctggcggtagataaagggcagagagaagcggcattatctattgggctaagcccaataaatgcttacaaagaggtaattctgccacaggcttttgtagcagcatttccatccttaggaaattcgtttatttcaatgataaaaaatacagctattggatttacgataggagttgtagatatacttgcacaggctaaaattttggcggcttcatctttaaacttttttgaggcgtacatatctgttggagttgtatattgggtagttttagttgtgatagattggatattgcgctatatagaatcaaagatttgtaaatatttataggagaaagacggtatgaaaaatacagatgtgaatagaatgacaaaggcattggggcttcagagaaagattataggtgttcgatttctttatttcagacatgaatatgataatatggatgtggcagaatatgggaaaaaaacgagttattgtatgatggtaaaacatgcaatggataacaattgttttaaggctaaattagaaaattttggctgtagatgtgcactggaagcattggggcttgatgaagaaatggaatgcgtagaatctggacagagatattatagtttaaatctttatgaaagccgggcagttgccaaagatgtaacaaaagatatttcaaggataaaacagaaaatatatggagttcagcttggtccattagagcaattagaagacgcagatgttgttatatttatggttaatgcatatcaattgatgcgtgttgttcaaggttatacatataaatggggaattccaaagaatttgtatatggctggaaatcagggagtgtgtgcagatcttacagcgggaccatttgaaaaaaatgatatgaatttttctgttttatgtgcaggtacaagaaagatgtgtgcctggagagatgatgaaatgggcgtcggtcttccaattcagcaatttgagccattgacagaaggggttatacaaactatgaattacatagattatccgactcagaaagatcaaatcagtgaaagacttgagaatccgatggaactgggcgttgcagtagataaaaatttacattatggaaaactgggaaaaccttacgtgcggccaagtgtgtatgaacaattgaaagatggagaactggaatgattaaaataacggatttacacaaaaactttggggaattaaatgtactgaaaggaattgattttcaggctgatacaggagaagttattgtaataatcggaccgtctggaatgggaaagtctacttttttgaggtgtattaattatattgaacgaccagagaagggaatcattgaaattgataatataaaagtagatgctgaaaaatgtacggaaaaagaaattaaacagctaagattaaaaacttcgatggtatttcaaaattacaatatatttaaaaataagacagtcatagaaaatcttatgcttccaatgacttctgttcaaaaaattgacaaaggcaaagcaaaggaaaaagccttacaatatttagagcaggttgggttattggataaagttaatgaatatccgtcgagattgtctggaggacaacaacagagagtaggaattgcacgggcaatggcagtaaatcctaaattaattttactggacgagccgacatcttctttggatccggaacttgtgcttggaatcttggatatattgagaaatctggctaatgaacataaacgtacaatgattattgttacgcacgaaatgcggtttgcgaaggaaattgcagaccgtattatatttatggatgatggcagaattatagagcaggggactccggaagaaatctttacgaatcctcaaaatgacaggacaaaaagatttttggagagattccaagaattttaactaattttgccaaaaacacaaaagtataaggataattgggattaaaaactcttcttaaaaaatcgctcaggtatgagcgattttttataaataagaaaatatggctcttgtcggtgaaccagacttattgctacttgatgagccaattaacggtcttgactcacaagggattgtggaaattagaaataagctgttagacttgaataaaagaaaagacattacaattatcatttcaagtcacattttagaggaactttcaaagattgcatgcaactaattttggctttatcaataatggcgaattagtgaaaggcttgttcatggtaaaaaataattttactagttgtttatgtaaattttacattagtgtggtagaaaaaaagaaacaaagtgtgatattttgtacaaagagatactataattgttggaaggagatatttatatgggtgaaataactttagtagaaacaaattcaatggtgtatggactaataaaggctgttttacgtttaaaatctaataggttagcattctagggctctgtttctgtatggaacagagctttttggaggtttattaaggatgaaaagatataatgtaggcgaaaaagtaatacattgtccggaaggagtatgtaaagttgaagatatttgtcaaatggtatattccgacaaaatatttattcgtggaggaatgtcgttatgagaaaaatatatgtaattgatacgaacattttgattcatgcgccagaggcaattttgaattttgaagataacgaggtactgctccctatggtagtattggaagaacttgatggattgaaaaattctgaaaaggaaaaggggagaaatgccagagaggcaattcgtcatctggagaatcttcgagtgcagggcaatcttgtagaaggtgtggagacagagcagggaggaatcatccgggtagaaaaaaattatgttgatattgaacttccaacggatatgccggaagataagatggacaaccggatattaaaggtatgtctgggacttcagaaagattatccggaaggacagattattttggttacaaaagatatgcttcttagaatcaaggcgcagatgctgtcaattacggctcaggattatacaacggacagaatattaaaggaagaagaacagtatagcggaaggctggaggtttatgtagaggaagatcattttaaagaacttaaaaagaaaggaatcaaaccggaatatatttatcaaatgggagaggatggaattcgtcatcaggttgtgccggagatgaatcagttccttatcttaaaggcagaccaatctacgaaaaaaacccagcttggacgttttgatggaacaaaagtagttccattgcaatataagaaaagcaagccgtatggtgtgtcaccaagaaatgtaggtcagtatttcctacaggaagcattaatgacatctgcggaagatgccccgcttgtaattgtaaagggaatggcaggtactgcaaagacattttatgcggttgccgtaggattggaaaaggtattcaatgttgaaaaaaaggaatataggaaaatccttatcagtagaccgaatgctcaatttgatgatgatattggttatcttccgggaacggaacaggagaaaatcttaccgttaatgcgtccgattattgataatctggaacaattgatcgattctgatgaagaagaacgatataaagatgaggaagaactgcatgctaaaatagatgagttattttcaagaggactgattgaaacagaagcgatgaactttattcgtggaaggtcatttgtaaatacatatctgataattgatgaagctcagaacatgacaccaaaacaggtaacaggtattattacccgtgccggaaaaggaacgaaagtaattcttcttggagatccgaagcagatagataatccatatctggatgaacagacaaatggcttgagttatgcatcggagcatatgaaggacagtccgttctgttatcaaatcacattaaacgcggaagaatgtgaacggtcagaattggctatggatgcaatacaaaggatgtagaaagacagaggcaaaaaattgaatttaacatatcaggatataaaggcaaacaaagaaattaaccagtatatcacgatgggaaatgaaatactgggggttcttggatatacagaccattcacaaaaacatgctgtgattgttgccgaacgagcagcaggggtgttggaagtattgggatattcaaaaaaagaaatagaattatgcaaaattgcaggatttatgcatgatataggaaactgtgtgaatcgttcagatcacgcacacagcggagcgattatggcaatgcagatactgcggagtcttggaatgagtgcagaagatatttcggttgtgatttccgcaattggaaatcatgatgaaaaaaccggaactgcggtaaatgcagtttctgcggccattattctggcagataaaactgatgtgcggagaaaccgtgtacgcaataaaaaaaagtcaagttttgatattcacgaccgagtcaattttggtgtactttcaacagaacttacagcgaaccctgagaaaaaagaaatacatctgaatttagaattagatgaagaaaaatgctctattttagattattttgaaattttcacagaacgaatgctgatgtgcaggagagcttcggagatgttgggaatgcattttaagtttacagtcaatgaaagaaaagtattgtgatttgcagtatctctattttatcacttgcggagagaaaatttatataaaagtagtaagaaaacccagtaaaatcgccgtgtggcaaaactgctgaagaaacgtgataatcttttagtagtgcgtatggaaatcagccaaaaaaagtgctgcaaataatagctatggttagatgtgattaaaaacgaaaggagattgaagatatgccatcgacatatgcacattataaattcggtcaggaaatacgacacaaattaaccagaaaagaaaaacagattatagacgaatttccggattactttaatatcggacttcatggcccggatattctcttttattataaaccgttacgaagcaactctgttaaccaaattggttatagtactcatgataaaagcggccttatattttttgaaaatgccgccaagattctcaaactgcatccgcaggataaccgctactactcctatctctatggagtaatctgtcattttgcattagatacaacctgtcacggatacattgcagaaaaaattgctaagagtggaatttcccacacggaaatagaagtggaatttgaccgtgctcttttgactgctgacggacttaaccctatcactcagccgttaaccgaacatatcaaaacgagtgaagaattcggtgatgtgatacattccttttttccacctgtaagtggagcagaagtgactactgccttaaagggtatgattcacaataacaatttgctggtcgcgccatcccattttaagcgcagtatcatatatctgattttgtttttatccggtaactacaaagaaatgcacgggctgattgtcaattatcatgaaaatccaagctgccgtgacagcacggaaatgcttatgcagttatatcagaaagctaaaatcacagccctcgcgttaattcgtgagtatgaatattctgtaaatgaagatataccgttaaatccaatatatcaatataattttgcaggaaatctgataaaggaggaaattcactcatgaaattaacaagagaagaaaaaaactggatattgtatgatgtaggtaattctgcttttgttttactcgttactactattatgccgatttattttaattatcttgcaggtaatgcaggattgtccgatgcacagtatttagcctactggggctatgccgcctccattgctacgcttattactgcatttctcggacctgttatcggaacattggcagataccaaagggtttaagaaaccaatttttctgatttccttaattataggaacggttggctgtatcagtctcggtctggcaaagcaatggactatattcttagttatttatatcattgcaaaaattggattttccgccagcactattttttacgattccatgctgtcagatgtaacaatcgaagaacgattagataatgtctcatctcaaggatatgcctggggatatattggaagctgtattccatttatcttatgcatggttgtagtcctgggcgcagataaaatcggaattagtcttgaaactgctatgattatctcatttgcaatagttgcagtatggtggttttgcctgacgatcccgctgttaaaaacctatcagcagaaatattttgtggaacgccaacaacatgcagtatcagcaagttttaagcgtattggaaatacaatccgcaatgttcgaaatgaaaaaaaggtgtttatatttttgctggctttcttcttctatattgatggagtctacaccattattgatatggcaaccgcatacggttcagctcttgggctggacagtaccggactgctgttagcacttcttgcaacatagtttgtagcatttccgtgttctattttattcggaaaactggccaaaaaacatgctgctgaaaaactaattggcatatgcattgcagcttattttggaattgccattttcgctatgttcctacagcatcaatggcagttttggatgcttgctgtgctggttggtatgtttcagggcggtattcaggcattgtcccgttcctatttcacaaagattattccggcgaaacagtccggcgaatattttgggttaatggatatttgcggcaaaggggcttcctttgtaggaactactgttgtcagccttgtatcgcaacttacaaatgatgtcaataaaggggttggcatgatcgcctttatgttcattattggcggtattctgttttatattgcagcacgagctgagaatgcttcatcctgttctgtcaaataatgaagaaatttttaatggtttatgaattaaagaaggagtatcattttgtgcatgttttgacgaaggtagtttatggatagtacagataataattaatataattacatttaatacctgttgagttaaatgaaaaaggaccagttccgaagaaatggccagtttcgcttcatgaattaaacacatcaggtttctaaatgttttatttagtaattacatgcgataattgcacttatagaaaccagcgtaaaaattcattacatagtttaagtaattgattaattttttcatatagtaattctcctttctcttatttacaagttcattctaaatcataaaaggaagtattacttgccaaatgtgaataaaaagtagccagattttgttagggagggatggcaatgatttctgtgtatgaacaaaaaagggaacaatttaatattgtacataaagtgtcaaagcattatccaccgcatctacatgccaacctggagattgtgtatgtaacagaaggaacattggaattgggggttgggcaagatttctttcatatggaaaaaggagattttgcaatcgtatttccaaatatgatacatcattatcaggtgttttcaaatgacagcagtaaagcattttatctatatccgccactttcgtatgcggggcagtttgtgggcaaacttcaaaaatattgtccagagaatccagttattaaaaaagaatgtgtacatgatgatattttgaatgcgattcgttgtttatatcgtgagcatacaagaaacactattgtggagcagtgttatgttcaaatcattatggccagaagtttgccatgcttccagttgattgaaaaggatagttttagtagtggggatattatttatcggacggtatcttatgtggcggcacattttaaagaagaaattacattggatatgatggcaagagatttaggagtcagtaaatacgttttatcccgagtattctcggcaacatttcataaaaattataatcaatacttaaatgagcaaaggatgaattatgtaatctcactattggagtgttcagacgaacccattaccgatatttgcctggatgcaggattccagagtcagcggacgtttaatagggtgttccaagaaatgtataaaatgagtccgagagaatacagaaattattttagagaaaaaaatattacacatgaatatttcgaaggttagacatagggtggacaacttaagatcaggccggagaagcctgatcttaagtatcctgctgaagttgtttgcgaaattctgaaggcgacaatccgctttgcttcttgaaaacccgactaaagtaaaaaggatcatcgtatccaagaatttgggcaatttctgaaacattgtaattagttgtttcaagaagagtttgtgcattggaaatccgtaaggattgaatatattgagtcggagttgcttctgtatattctttgaaattcctgataaaccagctgatgctcatatgatgttcagtggcgtattcttcaatactgattgctttagtatagttctcatgaaaatatcgaactgcagaatccatttcttccataagcagacggtttttacctttgggtttgtggctgtctaaccgatgcaacataatcagaagatgttttaagtaattgacaagaagttcttcataatcctctttacataacttcaattcttggatcatttgtaaaaaaatatgcttatattccaaagaagtaccggtatgaattacatgtgcctcatccggaataccgtattttcttagaatattttttacgttattaccggtaaagtgaacccaatacacttccgtatggtcagttccatagtagtaatagcgttgctcttctttagggcgatagatgaccatattacctgcattaacgatttcttcaataccgttaaagtagaaatgggctttgccggaagcaatgtagaggatttgatagtcaattctgccacggggacggttggtaggaagttttggttttgtaatcagacgataggtaccgcaactagtaacaaacagagcgtattttttgtctttgaagtcaagtaccttattatgccaataagcagaatctatatacataacaaagcccccttagagaatgaatttgtccataattatgaaaattataagtaaattatatcattttgtgcatggtttgtccaatcttattcatgttaatagaatgtgctactgtatataattatagaaaaagagaaaacaaggaaatgcaaaaaaagctataaattcaagaaggaggtagtttaaatgcattcattagtgaaatcccgggaagaatcggaccgcttccagttattaaacggagagtgggggagtccggtattatgagagtatttatgacttgcaggaaaaattctatgagaaagatttcgatgcaagccaatttgaccaagtgaaggttccgggcgtgtggcagttttatggttacgcttcccatcagtatacaaatatccgatatccatttccatttgacccaccgtatgtaccacaggataatccatgtggaacatatatatatatgattttgaatacaagataagtgagttggcgccaaaagcatacctgttatttgaaggtgtagattcatgcttttatgtgtggatcaatggagagtatgttggatatagccaggtttcccattctacaagcgagtttgatgtgacggatgttttggaagaaggaaaaaaccgtattgcagtgctggttctgaaatggtgtgattgaagttacttagaagaccaggataagttccgtatgagcggcattttcaacgatgtatatttgctgaatcgtcctaaccagtgtatttatgattattatattacgacgacgcatacagacaaaaagcaaaaaatctgtatacgattgtatttgaaacggaaaaagaggtcatcacagaccgggtgggtattcgtgaaattcatattgagaatcgtgtagtttacttcaatggaaaacgatgaagcagcataaaatgcttccgtctatacgcaggaagaactgacggttttatgcctggattatgcacaaaacggcattggatcaaacagttgcggaccggaactggcagagcagtacagattagacagcaaagagtttgtatttggaatcaggctaataccgtacaaaaattgatgatttataagaaaaatgggagaaaaaagatggaagaaaagaaatacttaaaatggtataacaaagtcggatatggttccggagatattgcgggaaatgtggtatatgcattcctttccgcttttgttatgatttatcttaccaatacagtggggctgaacccaggtattgtaggtacattgattgcagtttctaaactttttgatggaataacagatgttttctttggttcaatgattgataaaaccaagagcaggatgggaaaagccagaccatggatgctttatggatacattggttgtgcagttacattggcagcgattttcgcaatcccgactgatcttggggaatttgcacagtatgcgtggtttttcattgcatatacgctccttaatgcagtattctatacagcaaacaatattgcttattctgcactgaccgctttgattacaaaaaacaacaaagaaagagtagagatgggttcttatcgttttatatttgctttttcaaccagccttttgattcagtctgtaacgcttgcttttgtagataaacttggcggaggcgcagatggctggagagcggcagctattatctatgcaattcttggtttgattgtaaatacgatatccgtactgtccgtaaaggaattaccggaggaagaactgaatgatggtatggaaaaaaatgatgatgaaaagtatacacttatagatgccgcaaaactgttattctcgaataagtattatgtaatgatctgtgccacatacattttacagcagatttatgttgccatgattaatatgggactgtattacatgatgtacattctgtttaataaagagttatatccaatattctcttgggcaattaatattccactgataattgcattgttaattacaccatctctggttgcgaagtggaaaggaatgtataaattaaacctgaccggttatgtagttggaacgattggtcgtgcattagtagttgttgcagcatatttaggcagtgtagagttgatgcttgtatttacagccgtggctgcatttggtacaggtccatggcagggagacatgaatgctgttattgcagaatgttcggagtatacttatctgacaaaaaagaagcgtgtagatggaacgatgtattcgtgtacatcattgggtgtaaaacttggtggtggattagggacggcaatttcaggatggcttttggaattcagtggattcagtgaaaaattaacgatacagccggattcttgtatccagatgctccatatcatgtatttgtggattccatttgtgatcacgctgattattacgattatcatgtcaaaaatgaaagtcgaaaaagcaaatacagaattaaaaactcaagaattaaattagtataataaaggggctatcgggaaatagatagttccaaataggggcagatgtgactcataccaggtcacatctgcccctgaaatttttccataaaagagaaaaagatggctaacgacaaccatctcttctccgttacatgttataatgtaactatgctaaacaataagtattataacgaattttttgaattagggcaacagaaaattaacttcagtttcttcgaattgtgtttacctgacgacgatccagtctataccctgaaaaaagtgatggaggaattagatttttctggcttgttggccaattgttcagataagggaagaaccgggtataacccaattatgatgtatgccgtagttacttacgcaaacatgcgtgggattagagctgttgaccgtattgtggaattatgcgaaagagaccttgcatttatctggcttaccaaaggtcagaaaccaaaaagggatgctttttatgagttcaagaataaaagactgactgcagatgtattggatgagttgaattaccagtttctccgccgcctgcaaaaagaaggactgatcacattgaaatccctttttattgatggaacaaaaatagaggccaatgcaaaccgctatacatttgtgtggagagggacgatcaattatcatctcgcaggcttactcgatatgattgattcactgtatcagaagtataatgcatggatagatgaaaatgagtatggcataaaatatgacattccccatgcacatatgtttgtgatcgaaggaatggataaggtaagagatgtcattgaaaagaaccggaagcgaaaactgacaaaacataaaaagttgtccaataatacgatcatcgagattgacaactgttccccattggagattttgaaacttcagaaaaatctgactcagatcgcagagaaggaacagattgcgtttgtttacggaaaagggaagaggaaatcggagctccagcagctttatgaggaattagaaacctgcggcaaacgccttatgggatacaaagaatgttttgagatcatgggaaaggacaggaacagctattccaaaacagatttagaagccacctttatgagaatgaaagaagatcacatgctgaacggacagttaaaagccgcatataatgttcagatcgcagtagagaattatttcattgtccatgcttatgtaagcaatgaccggacagactataacacactgattccggttttagaaaagcataaaaatgcatttggggagattttggaagaagtaaccgcagatagcggttattgtagcgagaaaaatcttctgtatttaaagaaaaataagatatccagttacatcaagctgcaggatcatgaaaaacggaaaacacgcgcttacagagaagatattggaaaatattacaacatgaaaacacagatatttgaggatgaacggtattatgtttgtcatgacggaagaggattgcatcatatccgcacagagaccaaaaaacagccgggttatacccagacttttgaggtatacggatgtgcagactgtagtggttgtgaacacaaagcgaaatgcttatataaatataacgcagaaaaagatgctgagaaaaacaaagttatgaagatcaatgaacaatgggaaacattgaaagaggaatcccatgcaaacatccaaagtgagaaagggattctaaatcgtcagatccgttccatccagacagaaggacattttggagatatcaagggaaatgatagtttccgaagattcaactaccgaacgtcagagaaggtgtataaagaattcatgctgtatgccattggtcggaacatgaataaatatcatcgttttcttcatgaagagattaaaaaattcgaaggaaaaaccgaggaaaagacggcttaaaaaatgtgcatgttcaaaaatgcagttatgggtgttttgcgccctaaaatatatacagaaaaagaacaataagaatctcccacagaatatcaagtatgaaaaacactgatttttatgggagattcttattttaggatttagagtttaaaaatcggtattaaccgacatcccctttccgcatagtgaattttctgattcctaatcgtcttcctcgctctggacggtgtaggtctgtctctttctggccatctcgtcattttccaagtactcgtcgtaagtggtgatcttgtcgatcaacttgccgcccggcacgatctccatgatacggttggcagtggtctgcacgatctgatggtcatgggaggtgaacagaatcacacccgggaacttgatcagcccgttattgagcgccgtgatagcttccatatccaagtggttggtgggctcgtccaagagtagcacattggctccggagatcatcatcttggacagaaggcaacggactttttcgcctccggagagtacctttaccttcttgacgccgtcatcccctgagaagagcatacgtcccaggaagccccggacgtaggttacgtccttgatctcagagtactgggtcagccattctacgatggtatactcattttcaaattcttctccgctgtccagcgggaagtaggcctgggatgtggtgacgccccatttataagttccttcatccggctccatctcgccggtaagaatctggaagagcgtggtcttggcctgctcattgcttccaacgaaggctaccttgtcttcacggttcagggtaaaagtgaggttatccagcactttttcgccgtcgatggtcttgctgagtccttctacggacaggacttcgttgccgatctcgcggttcgggcggaagtcgatatacggatacttacggctggatggctggatatcatccaactggatcttctccagagcccgctttctggaagtcgcctgcttggacttggaagcattagcgctgaaccgggagatgaattcctggagttccttgatcttttcttccttctttttgttggcttccttcatctgacggatcagaagttggctggattcgtaccagaagtcatagtttccggcataaagcttgatctttccatagtcaatatctgcaatctgggtgcagactttgttcaggaaataccggtcatgggatacgacgatgactgtattctcaaaattgatcaggaattcttccagccaggcgatggcgtccagatccaaatggttggtaggctcatccagaagcagaatgtccgggttgccgaacagtgcctgggcaagaaggatcttgaccttctccgggccattcagattcttcataatctcatagtgatattccgtggaaatgccaaggccattcagaagagtagcggcatcggattctgccccccatccgttcatggcggcgaattccgcctccagctcgctggcttttatgccatcttcatctgagaaatcttctttggcatagatggcttccttttccttcataatctcataaagcctggcgtttcccatcattacagtgtccaggacgggatattcgtcatacttgaagtgatcctgctggaggaaagacagacgctcccccggcgtgatgatgacatcgcccttggttggctccagctgtccggagagaatcttcagaaaggtagattttcccgcgccgttggcgccaatcaggccatagcagtttccttcggtaaacttgatattaacatcttcaaacagggccttcttgccgacccgtagcgtcacattgcttgtactgatcatagtatctgtatgctccttatatatttgatcttttcatattatatatccagcctatcttaacaaatatcatgtaaaatagcaattaatttccggaaattgagagatttggagaagatacagtttcatttcttatgaaaatgggtatataatagcaagtaagaaagcggggtataaaattatgacgacagcaacgattgtacttgagggaggggctaccaggggagtgtttacttcaggcgccctggattatctgatggagcaggatttgtatctgtcccatgtgatcggcgtatcggccggctcctgcaatggagtggactatgtttcaaagcagcccggcagaaccagggactgcatgatacacaaggagaaagaatatagctattattatggatttactaagttcatacgggaaaagagcctgttagatatggatatggtatttgacaagtatcccaatgaactgtttccctttgactttgatacttattttgcctcggagatggagtgcgagatcgtgactacgaactgtgagactggacgggcagaatatatgaaggaagagggcgacagagacaggcttatgaaactgtgccgggcctccagcagcatgccgcttgtatcccccatcgtgaatgtggacggtattccctatctggacggagggctggcggattcgattccgattaaaagagcgctggagaaaggaaatgataagattgttctgatcctgaccaggaatccgggataccgcaagaagcctaccacgaaggcggtagccaatctgtaccggagagcctataagaagtatccgaatctggtgcgcaccaccatacggcgcaaccatgtgtataacaggcagatggaactggtggaacggctggaggaagaaggaagaatattcgtgctcaggccgctgatccctacggtgtcaaggcttgagaaggattatgatacgctgatgcatttctatgagcatggctataagactatgaagaaagaatacaaggcgctgatagaatacctggaagcctagcagaacaaggaggaaagaagatgaatctctacgaacaccacatagcgacaagcgattcccagcagatgtccaaagttaccaatatgatccgggaagatattaaaaagagtcgcatatcagaaggaattgtcgttgtctattctccccatacgacggcgggatttaccattaatgagaacgcggatccggatgtcgtgcatgacatgctgtatggacttgaagaatcatttcctaccaggacgcggtattaccagcatatggaaggcaattcccacgcgcatattaagaccagcttcatgggggcgtcccagactttgatcttgcatgacggagaactggtgcttggcatctggcaggatgtgtatttctgcgaatttgacggacccagaaaccgtacattctatgtcaagattatagagggatagaagatggattatcgcacattatcagaatttctggcgcttgcagaaaaattaaagtgccgcacgcggcattcctggatctccggcgggtgacaggagagcgtggcagagcatacataccgactgtgcgtattcgcctggcttgttaaggaggaattcccccaatatgacatagtttgtatgtgaaggaactccgggaagccagataggatggcttcccttttttatagatcctccaagttaattcctcttggagtttccatatgctttaaggttacatcaaagatattctctgtatcgcctgatttcatggcgttcagtattgcaagatgttcttcataagtatttttcattcttcctttatgggagagggagagttctgcaagtctccgcatccggtacatgaaggtattgtaaatagaacagaactgttcattgtcaagatactctatgattttcgtgtggaactggaaatcgtactcgcagaattctttaatagactgggtagaatccagtacgcgtttcagtttttccataatcccatccaattccttaaataatttcttcgcattccggctttggaaagtcttggaaatctgcaaggtacagtaagattccagggctgaacgtacctggaatgtctcattgacatccctgcggctcaactggtgcagcataaagcctttgcttgggataatatcaatatagccttcctgggccagccgatggatggcatcccggaacggagtacgggatatacccagttcctttgataatttggtttctgaatagatttcctgataggaaagcctgttggttataatgagattctgaagatgctggtatgcttgttcgtttaacggtatcataagtactccttaagttataataaacatttttttaacgaaatgagtgtaaaaaatacatttctaaagtctgtaaatatcatacaacaaacagagaaacgggtcaatagacagtgatacaggcaattgaaaatgattgtataaaacgttaaaaaaataacaaatggggaaggaggattatatgcagaatgtacaaaaataaagactgaaaactgttaaaacagagaaaagaaaacaaggacttgaccggtataccggtatgtagtagagtggagataagaacagaagtaatgaacagattgcttcaatgtgaacaataatgaacacaaagaaaggaagaggaaaatgaaagtagggtttatcggacttggaattatgggaaggcctatggcaaagaatatggtgaaggcaggcgttgacctgatggtagcggatttgaacaaagaagctgttgccgacgttgtggctgtcggtgcgaaagaaggtacatatgcgcagatcggggcagaatgcggcgtggtgttcacaatcgtgccaaacggcgatatcgtgaaatcgattctttttgatgagggcggagttgcgtctactttaaaggcgggcagcattgtatgcgatatgagctcggttacgccggtagaatctaaggaatgctataccaggctgaaagagaagggcgtaggattcatagatgcaccggtatccggaggcgagccgggagcggtcgcgggaacgcttgcgattatggcaggaggagaagagaaagatttccaggcgttgaaagaatactttgatatcctgggctcttctgccttgttaatcggcggttccggaagcggcagtgttaccaaacttgccaatcagattatcgtaaataatacgatcgccgttgtatcggaagctttcgtactggcagccaaggcaggggcagatccacagaaagtatatgaagcgatccggggcgggctggcaggaagcgcggttctggatgctaagatcccgatgatcgtagagcgcaatttcaagccgggcggtccaatccgaattaaccataaggatattaagaatgtggtaaataccgcacatgcggtggatgtaccgataccatataccgctcaactctatgagattctccagacattaaaaatccatggacatatggaagatgaccatgccggcatcgtacggtattttgagaaactggcagacgttgaagtaaagaaattcgactaaagatataggactaagataatagcagcgggaggatacagatatgtcaattggagcagaggcattgacctcatataagaaaattgatgaggcctatattgacggcctgttaaagaaagagatcgaggcaagcaataagaagattgtggtgctggatgacgacccaacaggcgtgcagacggttcatgatatctccgtctacacaaactgggataaagacagcatccggcaggggtttgacgaggagaacagcctgttctatgtcctgaccaactcaagagggtttacggtagagcagacaaagaaggcccacaatgagatcgcgtcagtggtagaccaggttgcaaaagagaccgggaaggaatatatattcatcagccggagcgacagcacgctgcgcggccattatccgctggagacggaacttctgaaggataaatatgagaagaacacgggcaagacgatcgacggagagattctctgtccattctttaaagaaggcggaagatatacggttgaaaacgtacattatgtcaaatatggggagaaactgattccagccaatgaaacagaatttgcaaaggataagactttcggttatacggctgcgaccgtgccggaatatgtggaggaaaagacgaaaggggcatataaggctgcggatgtaacctgcatatccctggaagatatccacaatatggatattgataagattgaagcgcagctgatggctgtcaaggattttaataagatcgtggtaaatgctgttggttatgcggatgtaaaagtattctgcacagcgctttaccgggcaatggcaaaaggaaaagtcttcatgttccgtacagcggcagccattgttaaggtaatgggcgcggttacagatcagcctcttcttaccagaggccaaatggtagtccgggaaacggacaagggaggaatcatagtcgtaggctcccatacggacaagacgacaaaacaggtggaggcattaaaagaactggacggcattgaatttattgaactggatgccacacttgtaaaagatgacgcggcatttgaagcagaagtgcaaagatgtcttgaccaggaagaagcatgcatcagggaaggaaagacggtatgctgctacacaagccgcgctctgatcaccgctgacaccggagacaaagaagacgagcttcggctctctgtaaaaatatctgatgcagtccagtcgttagtaggccgcttaagcgttacgccaagctttgtcattgcaaagggaggaattacatccagcgatgtaggaaccaaagcgcttgcagtaaaaaaggccaatgtgctgggacagataaagccggggattcctgtgtggcagacagggcaggaaagcaagtttcctatgactccgtatgtaatcttcccgggaaacgtaggagaaatcactacgctgaaagaagcggttgaagtattgatgattaagtaattgttcataatgaacataaacgaacagtttttattgtgcgtttttacggaaatattgataaaatttagattaaattgacaaaaacgaacatcggaagtacaatataaacataaaagaacatttgttatgtgaaaggagctagttgatgcctcaatgtgttgtaatagcagatgacttaacaggagcgaatgccaccggagtacttctgaagaagatgaactacaaagcctacacggtaatgaatacggaacggattgaactgtcaaccctgacggactgcgactgcgtgctctatcccacggacagccggggagtggagccgacaatcgcgtacaaccgggtacataacgtgtgcaatctgctgaagggaaaggatgtcaaggtgtattcaaagcgtattgacagtacgctgcgagggaatcttggcagcgagacggatgccatgctggattgtctgggggaggaatatgtggctatcgttgcgccctgctttccatcctcaggcagagtcgtaatcggaggatatatgctggtcaatgggatgccgcttcataagacggatattgctcttgatccgaagaccccggtcacgatatccgaggcagcggtattgtttgcacagcaaagcaagtacaaagtatcttccataatgatgagggatatgatgcatggaaaacactatctggctgaccggatgaataaactcgtgtcagaaggaagcaggatattggttctggactgtgtgacccaggaggatctggatctgatcgcagatgctgtaattaccagcaaattaaagactgtggcggttgatcccggcgtatttacagctacgctatccagaaaactgatcgtgcctgccaagaagaaagaaaagaataggattcttgctgtggtgggtagcgtcaatccaaatacaaaggtacagatggaagaactctggctctcccagagaacccacaatgtatttgtaaatacgaaggaattgctggaggggcaggaaagaagagaggaggaaattgtccgggcaacagaagccatccttaaagaatgcgacaagaatgtggtatgtaccgtgacgggcgatggcatctatcctgagaaccggatagatttcaagccatatatggaacgcgacaaatgcacccttgataccgtgacaggaataattaacagtgcttttgcagagattacttataggatattcaaggcggagcctgcatttaaggggctctataccagcggcggagatgttacagttgccgtgtgccagagatttaagactgccggcctgagcctgatggatgaagtattgccgctggccgcttatggacagttcctgaaaggagagttcgaaggcgtgcatatcattaccaaaggcggaagccagggcgggcgggatgcgatcaatcaatgtattacctatctgaaagaaaaactgtatatatagaatctgaattttatcaatgaaaggacgaagaattatgaaaaaatcattaatcgcagtaccaattggggatccggcaggggtcgggccggaaattgtcgcaaaggcagtcgcttcaaaagaagtggcggatgtggcaggatgcattatcgttggcgacaagacgatcgtggaaaatgccattaagatcacaggagcggatcttagagtccatgttatcaacgagccgaaagaaggagacttccgggagggaatcctcaatctgatcgacttaggcaatgttgatatggccggttttgaatttggcaaggtcaatggaatgtgcggcaaggccgcctatgaatacattgcaaaaagtattgaacttgcaaatgacggcaaggttgatgctgtcgctaccacgccaatcaataaggagtctttgcgcgcaggcggaatcaactacatcggccatacagagatttttggcgcccttaccggcaccgaggatcctctgaccatgtttgagacgaatggaatgcgcgtgtttttcctgaccaggcacgtatccttgcgagagatgctggatatgattacgaaagaacgaatcaaggattatgtaaaacggtgcctggaagccttgaagaggctgggcgtaacggacgggacaatggcaatcgcaggactgaatccgcatagtggagagcatggtctgtttggatgggaagaagttaatgagatcactccggcggtcgaggaacttaaagcagaaggatatgatgtagtcgggcctattggggcggactcggtcttccatcaggcagccttgggcaagtataacagcgtattgtccctctatcatgatcaggggcatattgcaacgaaaacccttgactttgaaagaacgattgcgattactaatggaatgccgatccttcggacatctgtggatcatggaacagcgtttgatattgccggaaaaggaattgtaagcgctgtcagcatgatcgaggccatcttgttggcggcgaaatacgcaccaaattttacaaagtaattctttaatgaaggaagaggagaacgaatatggtaaacggacttagtggggaaagaatgttggttggactggcaatcggtattgccatcctgatatttttagtattaaaaacaaaagtacaggcgtttctggcacttattatctgtacagttatcgttgggattgtcggcggaatgccgctttccactattacgctggaagatggcaaggcctttggaatcgtaaattccattaccaccggctttggaggaacgctgggaagcattggcattatcatcggctttggcgttatgatgggtcagttgtttgaagcaacaggagctgcaaaaagaatggctcatacatttctgaggttatttggcaagaaaagggaagaggaagcattagctctgactggattccttgtatcgatcccgatattctgcgattcaggatttgtagtacttgcacctatcgcaaaagcgatttcaaaggcaacaaagaagtccatcatcgggcttggagtcgcacttgcggcgggccttgtcatcacgcattccatggttcccccgacaccggggccgctgggagtctgcggaatctttgacattgatgtaggaaaatttatcctcctgtcactggtgctctcacttccgatggcaattgcatgtatcgcttatgcgagactgtatctttctaagaaatattaccggattccgaatgatgagggagagatcgtagaacttccttatcaggagccggattacgagaatgcattctcaatggatgtaaagggacttcctggaacattagagtcattcctgccattgatcgtgcctatcgtgctgattctgatcaatacggttgccagcgcacttggaaagacagaaggatttatggaaatcctcattttccttggacagccgattatcgcggtagggcttggacttctggtggcaatctttacattgggaaggaagctggatcggcatacggcggtaacggagatggaacgaggaatgatgtctgcaggtatcatcatgctggttaccggtggcggcggagcccttggacagatcatcaaggattccggacttggtacatatatagcagaaggccttgcaaagacggcgattccgatcatcatccttccgcttctgatttcaacggcaatgcgcttcatccagggttctggcacggtcgctatgacaacagccgcaagcatctctgccccgatcgtgatcgcggcaggcgtaagtcctctgctgggcgcggtggcatgctgcgtgggctccctgttctttggatactttaatgatagttatttctgggtggtcaacaggacgcttggagtaagcgaggcaaaagaccagctgacaatatggtctttaacatctacggttgcctgggcggtcggcgtagtggaagtattaatattgaatattttcatgtaatagagtaatatagatacagcgggagagagtcttccgctgtatatttgcttttgaagagaggagtggggctatgcttgcagcagaaaggcagtccaggattgtggatgtcatccgcaagaagggaagcgtccatgtagatgaactggcaaaggaactcagtgtcagcccaatgaccattcggagggatctggtaaaattacagcaggatgacagaatagagcgatgccacggaggggcgatggcaaagcaggaagttacctatgaggataagctgaccagccataaaaaagaaaaagagaagattgcaagatgctgcttttcgtatgtctcagaaggagatacggttttcttggatgcggggaccacgacttatgagatcgccagactgatcaaagacatcccaggaatcctgatcgttaccaatgatctggagatcgccaggcttattaaggacagcgacgcggaactttttatctgtggcggcagtgtacagaaatctaccggaagcatgtttggacattatgcaacccagatgctggcggattttaagttcgatgcgggctttttcggcgcggcatccatcaatgaagattttgaagtgatgactcctacgatagataagatgtggctaaagagggaaacgcccagacagtgcagaaaatcctatctggtggcagacagatccaagtttggacgacaggcaatgacaagaatcaatactctaggagattacagcgctgttattacagacaaagagtttgccgaagcagatttggaaagactggaacatatgaatgccgtaattattgaggcaaaataaatatttggcgcaagtgacagaggcttagacagtaagccgacaaaacgccgtaaccgtaaatctgatgattacggttacggcgttattatgattgccttaataggcgacttcctgaagataaagtccctttgggtcgcagggggcgcttgccagctgtcttcccgcgaaaatctcctcgatatcttcctttcttctggtgccaaagccgatatccatcagcgtgcctatgatgaggcgcgccatattgtgcaggaagtcatccgcatgtatcagaatctgcatctcctccgtatccccatatacctcgatctcaaatatctggcgttccgtggacttgctcttcttcgcggtggagaagttcttgaaatcatgctttccgattaaaagcatggcggcctgctgcatcacccgcttgtcaggtatcttaaaacagtggtaggtgtacttccggtcaaatacactggggacatcatcgatggtcatgcgatagacgtaagtcttggaggcggcattgagctgggcgtggaaacgttccggaacctcctcaacctccgtgatagcgatatccatgggaagatagcggttcagataatgcttgatctccaagacatccatcttggactccgtcttaaaattggcaatctgggcataggcatggacgcctacttccgtgcgacatccgcagttcagttcgattagatattcgccgctcatctttcttaagacttctattatcttgttggataccgtattattggattcttccttgccaaggcgtgtccagccctggtagcggctgccgtcatattctatcgttaatttgatgttcctcatacgcttttctcctttgattatgtgtcatctatctgtagcattgtacaatggaaagtacataaaattaatttaagtatatcaaatcttgtgctataatgaaagagcctggcaagaaaagaatagaaagaaattgtaggaaacagtagggaagggcaagtcatggtacattcaatatcgaaggaagaactgctggaggcaggatgcctgcatgccgggaagctggatgaggcatttgcgttatacagaagcgcttttatatctgcaaataacgaatctgatatgcttgttttcatcaggagactatacagcgtaaatgaaggggcagtttttgcggacttctattatccggtcctggatgcgcagtcccaggaaagattccgggcatgccttaatgggccgcagcttaaaatggcagaagcgttccaagcatccgacggacaggtatattatccgctggaagaggaaaggatgctggactttcttgttgtggccacggccagaaactggctgttttcaacattttattttgctgataaaaaagcgatgctgtggggaaactatgatttgaaatttccgatattctgcgaagatgaagcaaatctgcaggaatacatggaacttgccaaagtatatggattggagtgtcataaatgagtataaagagtaaaaaagtatcagaaacaatggtgcagaccgttcatatggtccggcctaaccacctgaatgcggcaggccgcctgtttgggggcatgctgatgcagtggattgacgaggtggccggactggtgggaaaacggcatacccatatgaacgtgatcaccgcctctgttgataacttaagattcctaagaggcgcctaccaaagagacgtggtagtcatcattgggaaggtgacatatgtggggaatacttccatggaagtcaaggtggatacctataaggagtccctggagggggagcgcacgccaatcaaccatgcttactttacaatggtggcactggatgaaaacgataagccgacccaggttccaaggcttgaactggagactgacgaagagcgggaagagtgggagagagcaaaaaaaagacgcgaaatccgtatgatgagaaaagaagaaggcttctagatataaaaaagcaaggcgtataaactgcacgccttgcttttttttgaaatgcttggaaagcggcggggctgcccggtggtatcaggacactgcttagacgccgccctttttcatgtaggtggtcaccatctttaccatgttctcaatctgatcctgttcttctttgggctttccttctttgagaacggcaatgatcagggacatctcgtcaggggtaaaacggacgccttttttgttggcgctggtaatcagcgccaacatcacgggagccagggacttgcctgacttgccctgggtctgcttggacgcggtcttgatcagttccagcttcaccgggtcgatattcttcattgcgggatggttaatccaatcattcattgtctgattctcctttctgattgtccgaattggcttgattcatttcttcgtcaaacatgctgctgtacgtattgaacatttcctgctggtcgggacttagcatgcctttcatcagatccatgggattaaaggcgccaaagccctggcttgcggagccatccgtattctgggaagcagcctcggacatttcctgcattccctgcatcatttctatcatattcatcatggcttccatctgttccatcatttctttttctcccggttccatgaaaggcttcagttcatctattattctaaaggaagggccgtgggaggaaaatccgtggaaatattccatagtgtgccttaattccaggaactttatatagattgccataaaacgctgcatggattggggagtgtatggaagcagcagttttaaagaatacagataaggcggcgtgaccatgctgtcaaaaggggtcatcggcttcggtggttttcgttccataggcactccttaaaataacgttgtaaatatatatgttacgagaatgggttttatgaaatatgcccaaactaaatataaagatttccatatattataaggtaggaatgaagtatgtaaaggagacaggcccatgaataggaaattaatcattgacggaaatgcggtgtacgagatcgatgaggaatgcatgctgaagaaacgtcttgatgaagagaaactcaaagaggatgagtcaaagaattcacatcaggataaaagaaaggaggcggagtgatatactccgtctcctttttccctgcccataggaaaatcctataggcagggttctttttaagtcagaaaaggattagcatccgcatccgcagtcgcatccgcatccattgccgttgccgccgaagccgccacagcaaacgagaagcaggatgatccagatacagctgtcattgcagcatccgcatccattgccgttgccgccgaagccgccacagcaacaaagaagcaggatgatccagatacagctgttgttgccaaagccacacccacagtctcctcctcttcctacagaatcacagccacatccacagttcgtagcacttaaatcgctcatattgaaatcctccgtttatgatatttacagtacataatatgcgaggggtttcaatgtgtgagatgatttgacttaatattttaccagccgttttacagagtgctggaactggaaggcattcttctgcagccttaacttttcaaccaccgggactttctcttttacatagtcatcgtaaagcgtaagaagataggcaatggtaaggtttcggtttttataccaggtgaaaagaagccagttcataatatcaggatgccagtatttttccggaatgctggcgccgcgcagcaagatgacgtatttgatagcctgcatggacagctgggcgagccggctggagcggtccttctccttgaaaagggcgtcgctttctacaataatatcgtacagcgcgctggcagccttccagtatgtaacaaaagtaggggcacaatcctcctcgggttcctcctcattacgcaggtcgaaggtttgcataacagctgttcgtccggtaatctccctgtcatattcggaacgtttcttgggatctgaaaggatgcggtaggcctccaggatctcctgcatctgctccgtcgtgtcaactcccagtttcatatttacgtcaggatggtatcttttggctagaaggttcttggcggcagtaatctcatccaacgtggctttcacagatacccctaaaatatcataataattcttgttctccattatatcctccccttatcaatacatggacctagaacataattatcttacgacaaatccggcaataaatcaattttatttcaaagaaatcttttaatttcattttaatacgaacgggcatccctttaacacccattttatatgctccatgctatcttgagattaaggaaaggaagataagatatcaggaggtaatcgatatgaaaaagcaagtgaatgacgaagtgatgacagacctatgcatgaaggtgaaaaaatatgtagaagaaaaggactgggattcttgtatggaactgatcccaagatatatggaacggtaccccaacagcgcggtaccccataacctgctgggaatcgtgctggagagccaggggcatcatcccgatgcaatgcggcatttccgcgcggcatggtcgctggatccgacattcatgccagcaagccagaatatagatgcctattccctctatgacagcgaaaaggatgttaagccggcctatacggcggatgactgcctgacagagaggcggcccacccttttagagaaatccggtttttttctgagacgcctgaggacggtcaaaaagaaggtccaggcggcataggacagaaatagctgctatataagcaatacgctgtaggaggaaagaaaaaaatgacaaattcaattatccaatatgtactttaccttgtaatacttgttgccctggccatcccgctggggggctacatagcaaaggttatgaatggagagaaagtatggattggcaaaattatctccccggtggagaatctcatctacaagatacttaaggtggaccaagatgaacagatgaattggaagaaatacgcggcaagcgttgggatgttcagcatcttcagtttccttctgctgttcgccattctgatgtgccaggggttcctgccctggaatccccagaagattcccggtatgagtccggatcttgcattcaatacggccgtcagttttgtgaccaataccaactggcaggcatacagcggagaaactggcctgtcatacttttcacagatggccggacttacggtgcagaactttgtatccgcagctgtaggaatcgcagtgctgttcgcactgatccgcggattcattaaagtgaagaaggaagggcttggcagtttctgggcggatcttaccagaatcgtattatatgttctgattccgttgtccattgtagttgccgtgggcctggcttctcagggagtcgttcagaatatgaaggaatatgagacggtccggcttctggaaccggtccgggcagaggatggagaagagataacggaggcaaccgttccgatgggaccggcggccagccaggttgccatcaagcagctgggaaccaatggaggaggattcttcggaaccaattcggcgtatccgcttgaaaatcctacgcctttttcaaatatgctggagatgatctccatcctgctgattccggtttcattatgcttcaccttcggaaaggcgttgaaggataggcggcagggccgtgccatttttgcggctatggcgatcatgctggtgctggcgcttgcaggcgttgccatagccgagcagaatgcgacgccgcagcttatggcagacgggcaggtcaatattgaggcgacagatggacagagcggcggtaacatggaaggaaaagaatcccggttcggaatcgcagccagttctacatgggcggtatttacgacggctgcatccaatggatccgtcaactccatgcatgattcttatacccctttaggaggcgcgattcccatgcttcttatgatgcttggagaagtcgtatttggaggtaccggctgcggattatatggcatgcttggatttgccatcatgaccgtcttcatagcaggccttatggtagggcggacgccggaatatctgggcaagaagatcgagccttttgaaatgaagatggcctgcgtcatatgccttgccacgccggtagccatattgatcggaagcggtattgccgcagttcttccgcagaatctggatagcctgaataatacgggcgcacatggattatccgagatactgtacgcctactcatcagccgggggcaacaatggttcggcatttgcgggatttggcgcagatacgccatttctcaatatctctctggggcttataatggctctggtgagattcgtgcctatgatggcagtgctggccattgcgggaagccttgcaaggaagaagcaagtagcgacgacagcaggcactttgtcaacctgcaatgcgatgttcgtaggattattgatcttcatcgttctgctggttggagcattgagtttcttcccggcgctttcattggggccgatcgcagaacatttacagatgatagggtaggaggcattaagtatggaaaaagtaaaaaaaaccagtcttgcagatggaaagatgataaaaagagccatcaaagattcattcataaaactatcgccgatgacagaagcgaagaatccggtcatgttcctggtatacgtctcagcaattctgacaactgggctgtttgtattgtcactcgtgggaatccaggatgcgccggcaggattcatcttcggagtggcgatcatcctgtggttcactgtccttttcgctaactttgcggaggcgattgccgaaggaagaggaaaggcccaggcagacgctttaagggcatccaagaaagatgtgacggcccacaagatcccttccattacaaagaaggaaaaggtggaagatgtaaagtctgcgttccttaagaaaggggaactggttatcgtcaaggccggagagcagataccggcagacggggaagttatcgaaggtgctgcatccgtcgatgaaagcgctatcacaggagagtcggcgccggtaatccgggaggcaggcggcgacagaagcgcagtaacaggaggaaccaccgtgttgtcagactggatcgtagtgcgtgtcaccagcgaggccggagagagtttcctggacaagatgattgcaatggttgaaggggcatccagaaagaagacgcccaatgagatcgcgctggagatattcctgattgccctgacgatcatctttatcttggttactgtatcgctgtacgcgtactccctgttctgtgcagatcaggcggggattgagaatccgacttccatcacttcgctgatcgctcttctggtctgccttgctccaaccaccatcggcgcattgctgtccgccattggtattgcgggaatgagcaggctgaacgaggcaaacgtgctggctatgagcggacgggccattgaggcggccggggacgtagacacgcttcttctggataagacagggaccatcacgcttggaaacaggcaggccagcgaatttattccagtagacggccacaccgttttggaggtggctgacgctgcccagctgtcctcgcttccggatgagacgccggaaggccgcagtattgtcattctcgccaaggatgaatttggaatacgcgggagggatcttgaggacttagagatggaattcatcccatttaccgccaagacccgcatgagcggcgtcaatgcaaaaggaatggaaatccgcaagggggctgcagaggcaatcaaaaaatatgtggaagcagggggaggcatcttcagcaaagagtgcgaagatgttgtgaaaaggattgcgggaaaagggggcacgcccttggtcgtcgcaaagaaccatctggtaatcggagtcatctatttaaaagatatcattaagtccggcgtgaaggagaagtttgcagatcttcgaaagatggggattaagaccgtgatgatcaccggagacaatccgatgactgcagcggcgatcgcagcagaagcaggcgtggatgatttcctggcgcaggccacgccggagggcaagctggagatgatccgggaactgcaaaggaaggggcatctggtggcaatgaccggagatgggacgaatgacgcgccggcgcttgcacaggcagatgtggcagttgccatgaataccggaacccaggctgcaaaagaagcgggcaatatggtagatctggattcctcgccgacgaagctgatcgatatcgtgcgaattggaaaacagctgctcatgacgagagggagcctgacaacgttcagcattgccaatgatcttgcaaaatatttcgcgattatcccggctctgttcatgggggtgtatccgggactggccgcgcttaatatcatggatctgcacagcgcgcagagcgccatattctcggcaatcatatacaatgcgctgattatcatcgcattgatcccgttggcgcttaagggcgtcaagtacagggaagtatcagcaggaaaactgcttagaaggaaccttctggtttatggagcaggcggcatcgttgcgccatttttgtgtatcaaagtgattgatatgctgattgtggcattaggattcctggtataaatgaagaaagaggtgtgggttatatgaaaatattaagatcagtaacaggaaaggcattggcagtcctggcggcatttactatattgtgtgggattctatatccgctggcggttaccggaatttcccagctgctctttcatgacaaggcaaatgggagtatcatagaagtggacggggtcaagtatggaagcgaacttctggggcaggaatttacaggcaaggaatatatgtggggacgtatcatgagcacgaacacggagaccttcacggatgaaaaaggaaatgccacgatatacgcaggtccctccaacaaatcaccggcaagccaggactatgaagaacaagtgaaggaacggatcgccatgattcagaaggccaatccagacgcgaaggaggagagcattccggtagatctggtcacaaattcggggagcggcctggatcctcatatcagcgccgatgcagctaagtaccaggtgtcaaggatcgcaaaagagcgggatatgcaggaagaagaggtggagaagatcattgacaagtatacgacaggcagattcttaggcatctttggagagaacacggtcaatgtgctggaagtcaaccttgcattggatggcattttgaagtaagataggtgcggtggaaaagatgagcttatatgaagataagagaaatcccgatctgttcctgaagcagatcatggaaagcgagaaggagcagaaacggaaagggagactaaaaatatttttcggatacgcagcaggcatagggaagacctatgccatgctgtcgtctgcgcataaggcgaaagaatcggggattgatgtggtggcgggatatatcgagccgcatacccggccggagaccatggctctcacagaagggcttgagatgcttccgcccaggaagatttcctataataatatagaactgaaagaattcgatttggaggcggcgctaataagaaagccggagattctgctggtggatgaacttgcccatacgaatgcagccggctcaaggcatgagaagcgctaccaggatatcaaggaactcttaagagcaggcataaatgtgtatacaaccgtcaatgtacagcatctggagagcctgaacgattccatcgcgggtataaccggcgttatggtaagagagcggattcccgattccgtgttcgatgaggctgaccaggtggagttggtggatatcgagccggaagaactgctggagcgcatgaagcagggaaagatctatggggagaagcaggccagccgggccatgtaccattttttcacgaaagagaatctggtgtctttaagggagattgccctgcgtagaatggcggaccgggtgaatctggcccaggaagccatatccaacgggggcgcagagacggtggagcatatattgatctgcctgtcgccgtctccctccaaccagaaggtgatccgtcaggcggcaaggatggccggggcattccacggaaagtttaccgccttgtatgtggagacgccagatgcttccggcatgaccaaggaagatatccggcagttaaatgagaataccaggcttgctgaacaactgggcgccaaggtggtaacttcctatggaagcgatatcgtggaagagatcggagcatatgccaaggtatcccgggtctccaagctggtgcttggaaggacgtataccaagcgtagaatgctatttatccgggacagtttctcggagcaattgagcaggcaggcaccctccctggagatcttcctgattccggacgcctatgataaaaagtacctgaaagggaagaagaaacgcaagcaggctaagggcagaaagaataccggaaaagatctgatgatctgcatagcaagccttgcaggttccacgatcgcagcgtttgccctgaaccgtatatttggattcagcgcggcgaatatcgtcatggtgtatatgctgagcgtgctgacctgcgcaatatttgccagccggcagatctggggagctattgccagcgtgatgagtattctggtattcaattttttctttacagagccgtttcggacgcttcaagtcaatgatccggggtatctgatcaccttcggagtcatgtttattacagcggttatcagttctacgctgacccgcaaggtcaaggattacgcaagatcgaatgcccgcaaggcgtatcggacagagatcctgctggaaaccagcaggaagctgcaggacgcatccacactggaggacattgccgcgaagacggcggaacagctggggatgctgctggagcggaatatttacttttatctgggaaaaccggagaaagataatgcaccgattgtctataaggttcatgaggatgcaccagagattctggatgatacggaacttgcagtagcccagtggacctaccgcaataacaagcatgctggatataccacgcagaccctccccggagccagatgtctgtgcatggcggtgcgcagcacggacaaggtcttcgcggtggtaggaatcgatatggagcggcgggagattccggcttttgaagaggggatcatgggggcgattctgaatgagtgcgcatttgcccttgagaaggaggaatggatgctctccagcaaggagtccgcggtaagactgcagaaagagcagttaagagccaatcttctaaggtccatttcccatgatttgcggacgcctctcaccagcatttccggaaatgcggagaccttgctgggaaatggagagcagattaaaacaaagcagaagaacgcgatctataaggatatctacgatgactccatgtggctgatcaatctggttgagaatctactgtcggtgaccaggatcgagaatggctccatggaactgaacctgcagggtgagatcatggaagatgtgatcatggaggctctaaggcatgtgaaccgcaggggaaaagagcaggagattgaagtggactgcgatgaattcctgatggtcagggtagacgtgaggctgatgatgcaggtgatcatcaatctagtggacaatgccatcaagtacacgccgccgctttccataatcagcattaaggcgaagcggttcggggatcgggcggtcatctccgtctcagataacggacccggaattcctgatgaccaaaaggaagaactgttccgcatgttctataccgtcaatcattccgtggcggacggcaggaggggcatggggcttggccttacactctgccaggccattgtaggtgcccatggaagtaagatcaaggtatatgacaatgtgccccagggaaccatattccggtttgaactgaaagtggaggatgtaaagttatgatgacgaatggaaaaccgtatattctggtggtggaggatgacgctcctgtaaggaacctgattacgacgacgctggaatcgcagaattataagtatatggctgctgccaatgggaatcaggcagtcatgtccgcggcatctggaagcccggacattattctgatggatctgggacttccggatatggacggcgtggacgtgatcaagaagatacgcacctggtccgtggctccgattatcgtgatcagcgcccgtagcgatgatcatgacaaggtggatgccttagacgcaggggcggacgattatctgacgaagcccttcagcgtagaggaactgctggcaaggctgcgctcaacgcttcggcgcgtccaatatctgatgcagaaggacgagggaaatgcaagcattttccataatggcgagctgacgattgattatggtgcgggaacggtatctatcggagatcatgagattcatcttatgcctttggaatatagccttttatgccttctggcaaaaaatgtggggaaggtgcttacttatcagttcatcctggataaagtatgggtcaatgccattgagagcgataggtcttccttaagagtctatatggcttctcttcgaaagaagatagagaaagacaagaaccacccccaatatattcagacgcatattggtgtcggataccggatgattcgaatatcctgataaaaaaggatattttaacatgaatcatgtgaaacaggcagtgcattattggtgcagtgatacgatagaagcaatgaataatggcagagacgtatgcgtggccgtactggacacagggcttgccatgcaccccgactttaccggaagggtcatagggtttaaggattgcgtgaacggacggcatggcttatatgacgacagcggccatgggacccatgtgacaggaatcctggcgggggacgggcgcgcctatcgaggcctctatggggggatggcacccaaggccaggctggttatcgtcaaggttctggatgaaggcggggaggggagcattcggcagatcctggagggaatccggtggatctttaagaaccggcttaaatatggcatccatgtggtgaatctatcggtgggagcaaagacaggcctggaggagcctaaggagaatgaactgctgcatgcagtggagcaattgtgggatgcgggtattgcggtagtggtgtctgccggtaactacgggccgggagaagggacggtggcagtacccggaaacagccggaaagtaattaccgtgggggcaatgggtaattccaaggtaaagaataactgctccggacttggtcccacgcagcagtgcatcgtaaagcctgacctggtggcgccgggctatcagattatgtcctgcaatgcaggttatccgaaggatcgaaggccctatgttatgaaaagcgggacgtctatggcaacgccaatagtggcaggggcgattgctttatacctgtccaaatatccagatgcgggaaatgtagagattaaactgctgctgagggagcggtgcgataaggctggaaagaagatgcccttctatggatggggaattctgaatgtagagagactgctgaaagaaaaatgaggcgaacgggatccagacagatgacgaagacgataacggcctggtgacttccgaggacgaggatgtgccgcttgccaatatcgacggctcaaaaggaggaagtcttggggcggcggcatgcagccggagacggaagcaattaataaaaaggtttacggggtgtcaagaaaaaatacttgacacctttatttttttgttatatgataacacaggtgagaaaatgaatgagatattagaacaggcattgctatacgatttttatggagaacttctgaccaagcatcagaaggagatctatgaacagttcgtattggaagacctatccttgggagagattgcaaaagaggcaggcatcagccgccagggcgtgcatgacctgatcaagagatgcaatcagacgcttaaggactacgaagataaactgcagctggtagcaaaattcgtggctgtcaaggataaggtgaagcagattgacgatttgctggatggatatcaagaaagcgatatccatgacattatagagaagatccgcaggatatccggcgagatcatagaggagttgtaaaatggcatttgacagtttgacagaaaaacttcagaacattttcaagaacttaagaagtaaaggccgactgaccgaagatgatgtaaaggaagccctcaaagagatcaagagggcgctgcttgcggcggacgtcaacttcaaggttgttaaggattttattaagaacgttcaggagcgggccataggccaggacgtgatgaacggactgaatccgggtcagatggtgattaaaattgtcaacgaggaactggtgaagctgatgggctccgagactacggagatcgcgcttcagccgggaagcgccatcacggtcatcatgatggcgggccttcagggagctggaaagacgacaaccactgccaaactggcagggaaatataaggtaaagggtaagaaccctcttctggtggcctgtgacgtataccgaccggcggcgatcaagcagttacaggttaatggcgagaagcagggcgtggaagtgttcgccatgggcgagagccataagccgtccaacattgccaaagcggcgatcgagcatgcacagaaaaacggcaaccggatcgtgattctggatacagccggacgccttcatattgatgaagatatgatggcggagctggcagagatcaaggaagcggtgaacgttcatcagacaatcctggtgatcgatgccatgacaggacaggacgcggtgaacgtggccaaagagtttaatgaaaagattggcgtagatggagtcatcgtcaccaagcttgacggcgatacaaggggcggcgcggcgctgtctgtaaaggcagttaccggaaagccgatcctatatgtaggtatgggagagaaactctctgatctggaacagttctatccggatcggatggcatcccgtattctgggaatgggagacgtgctcactttgatcgagaaggcggaggccgagatcgatgaagaaaaagcaaagcagatgtcccagaaactgaaaaaagcccagttcgattttgaagactatttggaaagcgtaaagcagatgaagaacatgggaggccttggcagcatcatgagcatgatgccagcgctgggcgcaggcatgggcaagatgaaggatctggacgaagaccagacggcccaggcagagaagaatatggcaaggatggaggccatgatctattccatgacgccggaggaaagaaggaatccggatcttctgaatccttccagaaagcacaggattgcaagaggagcaggggtagacatcagcgaagtcaaccggatggtcaagcaattcggcgagatgaagaagatgatgaagatggtgggaaaaagcggcagaaaaggaaagttccgcctgccgttctaaagttggtataccgcgcaggcgcgcgttatatagataatgaaaaaatattatggaggtgaaatactatggcagtaaaaatcagattaagaagaatgggacagaagaaggctcctttctatagaatcatcgttgctgattccagatcaccaagagatggcaagttcatcgatgagatcggtacttacgatccgaactgtgatcctagcgcaatcaaggttgacgaggaagcagctaagaagtggttaagcaatggtgcacagcctacagaagcagtaagcaagattcttaaagcagctggcattgagaaataagacatgcctttggaggtgcacgatatgaaagaattagttgaggttatcgcgaaagcgttagtcgacgatcctgacagcgttgttgttaatgagcgtgaggataagaagacgatgatcctggaagtacatgttgccgattccgatatgggcaaggtgattgggaagcagggacgtatcgccaaagcaatccgctctgtggtaaaggcagcggctgcgaaggaagataagaaagttatcgtagatatcatggattaatacgaatatgagagggacagacttggggacaggcctgtccttattcgtcccggaaagaggagattcatatggaagagttattacaggtaggcgtcattacgtctacgcatggaatccgcggagaggtcaaagtatttccgaccacggatgatgcgaagaggttcagggaactgaaggatgtgatgctggatacagggaaagagacattgtctttggaaattgaaggggtgaaattttttaaacagtttgtcatcctgaagtttaaaggcattgataatataaacgacgtagaaagatataagagatgcccgctttttgtaaatcgcgaagacgcggtggaactggaagaggacgaatatttcattgcagatatgatcggcatgaaggtcattacggatgaaggagaggaatttgggacgcttaaggatgtaatggagacaggcgccaatgacgtctatgtgatcaggcgggctgatggcggggaagtgctgattccggcgatcaaggagtgtatcctggatgtggacatccccggcaggctgatgaaaattcatgtgatggcaggccttgtgtaagcctgccgccaaaggcatagacgtagtgatttaaggagataagaaacatgcatttttatattatgacgttatttcctgacatggtaatgaatggcctgaacaccagcattaccggcagggcgatagaaaagggactgctaagcattgatgcggttaatataagggattatgcgtataataagcacaacagcgtggacgactatccctatggaggcggagcagggatgctgatgcaggcggagccggtctatcagacctatgaggcaatctgccagaaaagcgggaagcgtccgagagtcgtgtatctctccccccagggcaggacgttctgccagacgatggccgaggagtatgccagggaagaagaactggtgctattgtgcggacattatgaaggcatcgatgagagggtactggaagagatcgtgacggattacgtatctataggcgattatgtgctgaccggaggcgaactgccggcaatgataatggtagatgccatctcaaggctggttcccggagtactgcacaatgacgtgtctgcggaattcgaaagtttccaggataatctgctggagtatccccagtactcaaggccggagatatggcatgagaagcaggtgccgcaggtacttctctccgggcatcatgccaacatcgaagcatggagaagggaacagtccatcatacgcacggcaaagaaccggccggatctgttaaagaaggctaatctgacagagaaagaactggaaatcgccaagaaaagtcttgcaatagattaataaatatgataaactatagcatgttgtgaagagagagatggtcctctagtacgcatgtattaagaacatccaagtaaataaggaggtcacacagaatgaacgatattattaagaatattgaagccgagcagttaaaagagcaggctccggaattccatgttggagatacggtaaaggtatacggcaaaatcaaagaaggcgctcgcgagagaatccaggtatttgagggaaccgtactgaagagacagggcggcggatcaagagagacatttaccgtaagaaagaattctaacggaatcggtgttgagaagacttggccggtacactcaccaaacgttgagagagttgaagtagttagaagaggtaaggtaagaagagcgaaactgaactacttaagagaccgtgtgggcaagagagccaaagtaaaagaattagtaaaataagagacgatgagaaaaggacaagtacatattgtatattgtcctttttctgttttaaggggaaaatatgagacgaagaagaaagggcctgggattttcaaggccaagaagaaaaagaatccgcatcaaccttgaatatcttccggctgtcggaatctggatattcaagattgccattgtatgccttctggctttcgtggctgtgtggtatttcggccagagagtcagcaccgtaggggattctatgaacccagtgcttcataatggcgatgtcgtccttgtgaaccgtatcgtatacaatgccacgactcccaaaagaggcgatattatcgtattcaagcccaaggggaatgaaaatgcccactattacattaaaagaatcgtagggcttcccggagagacggttgagattatcgagaaccggatatatattgacggggaaaagctggaagaggattacaagacgacggatatagatgatgtgggaattgccaacgagaagatacatctggcaggagacgagtattttgtgctgggggatgaccgccaaaacagcgaggacagcaggaatgcggatgtgggcaatgtaaagcgggagtatatatatgggaaagcatggcttaccatatccccgaagaaaagttttggattgatcagataaggagataatgtatgcattttcaatggtatccgggtcatatgacaaaagcaaagcgtatgatgcaggagaatataaaattaattgatctggtgatcgagctggtggacgccaggattccggtgagcagcaggaatccggatattgatgaactggggaagaacaagtcgaggctgattcttctgaataaggccgatctggcggaggacaagtggaacgatgcctgggcggaatacttcagggagaagggcttcttcgttgtcaagttgaactccaaaaaaggcggcggattgaagtccatccagggtgttatccaggaggcctgcaaagagaagatggaacgggaccggaagaggggaatcctcaaccgtccggtacgggccatggtggtgggtattcccaatgtgggaaaatccacctttatcaatgcgctggcggggaaagcctgcgcaaagaccggcaataagccgggagtaaccaagggaaagcagtggattcgcctgaataagcaggtagaacttctggatacgccgggaatcctctggccgaagtttgaagaccagaaagttggattaaggctggcctttatcggctctatcaaagacgaaatcctgaatacggaagaactggcagccgagctgatcaagttcctgaatgcgaattatccgggcgcactggaagaaaaatacagcgtggaaccatcagacgacgcctatgtcatgcttgccggcatcgcaagaagcagaaactgtctcttgaagggcagcgagctggacacggaaaaggcggcgcttcttttgctggatgatttccggaatggaaaactgggaaggcttacactggaatatccacaggaagtgtgatagaatctagtgaggagtcagaaaggggattgcagcagatggcaagacgtacaagagaagagacgaaagaaagaagcattttccgggaactgggaggatggcttctatatatactgattatcattggccttacttacctgattatcacctttgtagggcagagaacgagagtcagcggctcatccatggagacgacgttgagcaatggagacaacttgatcgtagataagctgacctatcatttcaaggagccgaagcggtatgatattattgtatttccctataagtatgaggaaaatacatactatatcaagcgcatcatcggacttccgggagagacggtccaggtaatcgacggatatacgtatatcaacggcgaacagcttgtcggcgatatctatggcgcggaagtgatggaggcggcgggaattgctgccgagccaatcaccctgggggaggatgagtattttgtcctgggggacaatcggaaccacagttctgacagcagggacccaagcgttggaatcctgaagaggaaggatctgatgggaagagcctggatccgcatctatccatttgacaaaatgggagtgatcaagcatgaataaacgggaagaggaaaggcttagaaagcagcaggagaggctggaaaaggaactggcgcgcaccgaggctatgagcgtatacgagaaggaatacggggcgtgccggtatatatgcggaattgatgaagtaggaagggggccgcttgcagggccggttgtggcaggcgcggtgatcctgcctaaagatggttccatcctgtatctgaatgattccaaaaaactctcggaaaagaagcgggaggcgctgtatgaggagattatggagagggcggttgccacaggcatcggaattgtaggctcggcaaggatcgatgagatcaacatccttcaggcaacatatgaggcaatgcggagggcaatctctaatcttaaggtagagccggatcttttgctgaacgatgccgttaccatcccgcaggtttccatacggcaggtgcccatcataaaaggagacgctaagagcgtatccatagcggcggccagcattatcgcaaaggtgactagggacaggctgatggtggagtatgaccaggtacttccgggctatggctttgccagcaataaaggatatgggaccaaggcgcatatcgcggggcttagggaattagggccctccccgatccacagggctacatttattaagaactttgtatagcaagaagaaggcggcagcatgggattcaatacacgaaagatcggcacggaatatgaaagaaaggccggcgcttttctggaagccggaggatatgtaatacaggagtataacttccggtgcaggatgggcgagattgacattatagcaagagacggaaaatgcctcgtattctgcgaggtaaaataccgcggcggcccgggaagcggacatccggccgaggccgtggacgaaaagaagcagaggattatctcaaaatgcgccctgtactaccttgccgctaaggggcttcagggaatcgaatgccgctttgacgtggtcagcatagaaggagacgagattactttatacaagaatgcttttgactatattggctagcatgacaaggaagaggataaaatcatgagattaggcttaacctataagaatgaagaacatatatttgatgagaatgtggtgaatggggttccatacctttcctacccgctgcttgagggaactggcgcagtaaagcatgggttttcgacaaaactgggaggagtcagcacaggcagttgcgctaccatgaacatcagcaccaccaggggcgacgaccctgaagcggtagctgagaacaggcgcagaattggggcggctatcggcgtgcagccggaggatatgacctacacgcatcagacccacaccaccaatgtggcagtggtccaagctgaagacagagggcgaagatttatggaaacggacggactggtgactaatgtgccggggatctgcctggtaaccttctacgcggactgcgttccgctttttctggtcgatccggtaaaaaaggccatcggcctgagccattccggatggagagggacggtgggcaagataggaaaggttaccgtgcaggctatgatgagggaatatggctcaaggacggaagacatcgttgcggccatcggtccatccatctgtcaggactgctatgaagtcagcgaggatgtaattgacagattccgagacagttttaatgaagcagtctggccccggctgttctatagaaaagaaaatggaaagtaccagttggacctgtggcgggccaacgaagaggtattcctggaagcaggaatccgcaaagagaatcttgcagttaccaatctgtgcacccattgtaatcaagaggttctgttctcgcatcgggctacaggagagaaaaggggcaatctgagcgcatttcttgccttaaagtagagacaaggaggataaatatgacaacagagacgaccaacgaagttgctgaagtgacccagcagacggtgaaagaagtcagccgttttgcccaatatatacaagacaatatcccaacgctgatcggctttggaatccgggttcttctggccctggtattcttcttcatcggccggattctgatcaaatggatacgcaagatcgtaaggcgctccatcgagagatccagcgcggataagggcgtagagcagtttgtggattccgtgttaaaattcgcattatactttctgctcatattcagcattgcgtccaagttcggcgtagataccacatctgtggcagcgctgatcgcatccggcggcgtggctatcggtcttgccctccagggaagcctgtctaactttgccggcggcgtgctgatactgcttttgaagccatttgaagtcggagattacatcattgaggattccaatggaaaagaaggaaccgtcaaggaaattcagatattctatacaaaactcagcaccatcgacaataagacgatcgtgatacccaacggaatgctgaccaacaacagccttaccaatgccactgcaaaggatgaaaggcggctggaccttaaactatccatttcctacagcgcagaccttaaaaaggcgaagatgctgattgaaaatattatacgccaggacgagagcatcctgaaagatgatgagatcgtggtgttcgtagatgatctggcagacagcgccgtcgtaattggcgccagggcatgggtgaagaatgaggagttctggcccaccaaatggcggcttttggagaccatcaagctgacgcttgacgagcatggcgtggagataccatatccgcaactgacggtccatatgccaaaagggaattgagatgcatccgttcaggaatggaaatgaaagaactggaaggcttataagcaaaaaaagcgagttgataaatgaagaactattcatttatcaactcatttaataatctgatttttaagactagcgctatttttgattaaaaagctggaaatcggacttgaaccgacgaccccttcattacgagtgaagtgctctaccgactgagctattccagcatgtgccgtttcataacagccacaaataatattataacgaattttacaatatttgcaagaactttttttaaaagtttaaaagttagttttttgagtgaaatgtctgataaaattgtaagaatattgacttgggcataaaaaaaagactataataaattagttattatgactgatgataatggcataaggaagatcacgtttactattatgattcgtcaatgaaagaaatacgatataaactagcaagcagggaagacagatagatgaagaaaaaaattgttttaggtattttggcccatgtggatgcagggaagaccacgctgtcggaaggaatgctgtaccttagcggcagcctgcggaaacttggcagggtagaccatggaaatgcttttttagatacgtttgaactggaaagggagagagggattaccatcttctccaagcaggtggtatttcaggcgggcgatatagagataacgcttctggacaccccagggcatgtggatttttcggcggagatggaacgcacgctcccggtgctggactatgccctcttattgatcagcggctcggacggcatccaggggcatacagagacgctgtggcggctcctggataggtataagattccaaccttcctatttatcaataagatggatcaggaagggacagaccgggatagccttatgaaacagattaacgccaggtttggcggagagtgtatagactttgggcaggaaggggcgcagcaggatttttacgagcaggtggcgctgtgcgatgagaagacgttggaacattacctggcggacggacatcttgagacgaaggccattgccaggctgatcgaagagcggaaagtattcccctgctattttggctctgccttgaaattatccggggtggaagaattattagaagggcttgcgacatttacaacagcaaagaaatatccggacgaattcggggctaaggtgtataagattgcaagggacagccagggaagcaggctgacgtatctgaagatcacgggaggaagactaaaggtaaaggatgtgatcggggaaagcaaagtcgatcagatccgcatctattccgggaataagcatgaactggcgcaggaggcagaggcgggcatggtgtgcgcggttaccgggcttgataccacctatcccggacagggactgggaattgagaaggcatcggatatgccggtgctggagccagtattgacgtatcggatcgtattgccggaagatgccgatgtacaggccagcctcaggaattttaagttgctggaagaagaggagccccagcttcatatcgtctggaatgaaaggctgggtgagattcatgcgaaactgatgggagaagtccagatagacgtattaaaaaggctgatctgggaccgctttgggatggccgtgcaatttgatacgggcagcatcgtctacaaggaaaccataggctacccggtggaaggcgtagggcacttcgagccgctgcgccattatgcggaagtccaccttctgttggagccgctggaagaaggaagcggacttgtgtttgcttccgaggtcagtgttgaccagctggacggaaactggcagaggctgatcttaacccatctggaggaaaaggagcatctgggcgtgcttaccggatcggcgatcacggatatgaagataacgctgattgcaggcaaggcccatcagaagcatacggaaggcggggatttcaggcaggcggtataccgggctgtgcgccaggggcttaagaaggcgcagagcatcctgctggagccctactatacgttccgcctggaagtgcctacggagaatgtgggccgggcaatggcggatatccagagaatgaacgggcgttttgagccgcctgttaaggaaggagatatgtcagtgctgtccggcagcgcccccgtcgctgcaatgcgggactatcagacggaagtcatatcttacaccaggggcagagggaggctcttttgcatgctgaaaggatattccccatgtgccaatgcaaaagaggtgatcgaagcgatcggctatgattcggagagcgaccttgataatcctacaggctctgtattctgtgctcatggggcaggatatgtggcaaggtgggatcaggtggaagaactgatgcatgtggacagtggctggaagccgcagggagaaaagcaaaggcaagaagctgcagtgagcgcgccgcacacagccggacaagaatccagggatttcataggggatgagaaagaactaaaggagatattcgagcgcacgtatggtcccatcagacgtaagagcgcgccgcagcgaaggaagattgcagcaagcccggaaggctatcattccggacagagtacaggcagaaagaaaaaagcagaagatgaggaagcatatctgctggtagacgggtacaatattatctttgcctgggaggaactaaagcaactggcagaagacaatatcatgagcgccagggacaggctgatggatatcttaagcgattaccagggattccggaagatgacgctgattctcgtatttgatgcctataaggtggagggaaatcctggtaccatattcaagtaccataatatctatgtagtgtacacgaaggaagcagagacggcggaccagtatattgagaagacggtgcacaagatcggacgcaggcaccatgttaccgttgccacgtcagatgcgctggaacaggtgatcatattgggacagggcggacaccggatatcggcacaaggcctgcaaaacgagatcttactggcaaaacaagaactgcgggaagaacatctggaaaagacttcaaaaggaaagcgttatctttttgatggggcatcggatgagatgacagaatatgtggacagaatgcgtaacgaagatacgctggaatgaggaagcgatttaatatgtatggcagttgcgggaaaccgcagctgcttttttgccgccttgccatagaacgccctctttgcaacaaagtcatacccgcttgtgatagattctttccagaaggtttatcagcgaatacaaccccattgccataatgcagagcagaacgatggacatcagcagccaatccattttaaagacctggcttgagtaaatgatcagataaccaagcccatctcttgccgccaggaattctccgatgatcacgcctaccaggcatagaccgatgttgactttcatattactgataatggtaggaatcgtgctggggagaacgaccttggtcagggcatggaacctgcttcctcctaaggtatagattaactttatctttcctgggtctacgatggtaaaactggtataaaggcttaggatgctgccgaagatcgccacagacattccggccacgataatggtagtcttggtagcccccagccagacgattaagagtggcgccagcgccgatttgggcaggctgttcaggactaccagatagggatctaggatctcggagagcttgctgctgaaccagagcgtaactgccaccagaatgctgatggcaattacgagcaggaagctgacgatggtctcatacaatgtgactccaatatggaggaagatgcttttatccagcaccatgccccagaagcacagcgcaatcttagaagggctgctgaagataaaagaatctatgatccccacattagcagtgaattcccagataaaaaggaaacttaaaagaatcagtatcctggaaacacagacgattcttttatgcttcttatgctggagaaggtattttttctgtcctgcagataggtcactcattggtgttcagctccttccagatgagattgaaataggtcttgaattccggagcgttcctgcggttcaggggcgtatcggaatccagatcgaatatgagcgggatcgtctgcctgatggtagccggccggcccgataagacgatgactctgtcagccagagagattgcctccgacaagtcatgggttaccagcaaggcagacttcttctcctggcggaggatctgtccgatgtcatcgcctacattcagccgggtttgataatccagggcagagaaaggctcatccagaagcagaaggtcaggctccagaaccagcgtccggatgagagcggccctttggcgcatgccgccggacagttcggacgggcgggcattctcgaactggctcaagccatagacattcagaagttcatgggcacgctgccgggttctggccgtgagcatgtgttgtacttcaagccccagtactacgttgttgtagatcgtgcgccattcaaagagttcgtcatgctgaagcatatatcctacattcgtggtactctctcttaagtacttgccattaatttttatcaggcctttttccggagtgatcaaccctgcgatcagagaaagaagtgtagatttgccacagccggaaggtcctactatggatacaaactcccctttgttcaatgcaaaggagatgtcgataagagcaggcgtttctccttccaggttatggtaggcgtaatggatatgttttaattctaatacttgttccataggaacctcctgtaatgactatatactattttatgtggatatggggaattagtgacggattgcacttgtcagaatagtaagaagaagttataattcataagtacaacaccaagaactatcaaggggatggggcaggatgaattatcagaaggaactggacaggctgatcgaacgcctgaaaaaggaagagaaagtgccaagcctattgctgcacagctgctgcgcgccttgcagcagttatgtgctggaatatctgagcgactattttaatatcacggttttctattataatcccaatatatttccagagagcgaatataccaagaggatactggagcagcagatgctgatcggcgagatgaaggtgaagcgtccggtattatttattgccgggcactatgataaggaacggttttacgagatggcaaggggaatggaacatctgaaagaaggcggcgagcgctgtctgaagtgctacgagctaagacttcgggaagcggcaaagattgcaaaagaaggcggatttgaatattatacgactacgctgagcatcagcccgcttaagaatgcagaccgtttaaacgagatcggaaccaggcttgcgaatgaatacggtgtgaaatacctgcagtcagacttcaaaaaaaggaacggatataagcgttccatcgagttgtcgaaggaattcggactctacaggcaggactactgcggatgcgagttttccataagaaatgtaaaataatgcaataattgtttgattttatgcagaaatatgataaaatcgtagacaacgattcaatacgaaaggaagaaaatccatatggcacagttgtggggaggtcgtttcacaaaagaaacagaccagttagtatacaattttaatgcatcaatatcatttgacaagagattttatgcacaggatatccggggcagcatcgcgcatgtgatgatgcttgcgagacaagggatccttacggatatcgagaaggaaaagatcatcgagggactggaaggcatcctggatgacgtggagcagggcaaactcgtcatatcagacaaatatgaggacatccacagttttgtggaggctaccttgatcgaccggattggcgagcctggcaagaagctgcataccggaaggagcaggaacgaccaggtggctcttgatatgaagctttatataagagatgaagtacatatgctggataatctggtggaagagatactgctcgcaatcctgaccattatggaagagaatgttgatacctacatgccgggatttacccatctgcagaaggctcagccgattacgctggcccatcatatgggggcatacttcgagatgttcaaaagagaccatgaaaggctgacagacctgtaccggaggatgaatacgtgtccgctgggctcaggcgcgctggcagggactacatatccgctggaccgggaatatacggcaaggcttctgggatttgaaggccctacgctaaacagcatggacggagtgtccgacagggactatcttctggaactgctgtcgtccctttccatcattatgatgcacttaagcagattctcggaggaagtgatcatctggaattccaatgaataccagtttgtagagattgatgatgcttacagcacgggaagcagcatcatgccccagaagaagaacccggatatcgcggaactggtccgcggcaagaccggccgggtatacggggccttgaatgcgcttcttacgactatgaaaggaattccgctggcatataataaggatatgcaggaagataaggaatgggcgttcgacgcaatagacactgcgaaggggtgcctgacattatttgcggggatgctaaggagcatgcagtttaataaagcgcgcatgaaggacagtgcaagacatgggttcaccaatgcgacggatgccgctgattacctggtgaatcacgggatgcctttcagggatgcccacggcattgtaggacagttggtactgacatgcattgacaaaaagatcgcgctggatgaactccctctggaagagtaccagaagatctgtccggcctttgaaaaagatatatacgatgcgatcagcctggagacctgcgtgaacaagagaatcacgaccggggcgccgggaaggatggcaatggaagagacactggccatgtataaaaagtacatggaggaatattaagataaggagacattgacaatggaaaagaaattaaaagtaggtatcttaggagcaacaggtatggttggacagcgttttatctcattgctagaaaaccatccatggtttgaagtcgttacggtggctgcaagcccgagatcagcaggaaagacttatgaagaggccgtaggcggacgctggaagatggatactccgatgccggaaggcgttaaaagcctgattgtcctgaatgtaaatgaagtggaaaaggtggcggaaacggttgactttgtatttagcgccgttgacatgaccaaggaagagatcaaggcaattgaggaagcctatgccaggacagagacccctgtcgtatctaacaacagtgctcaccgctggacgccagacgttccgatggtagtgccggagattaacgtggagcattttgatgtgatcgagtctcagaagaagcgtctgggaacagagcgcggcttcatcgcagtcaagccaaactgctccatccagagttataccccatgtcttgctgcatggaaggaatttggccccaaggaggtggttgccactacctatcaagcaatctcgggagccggaaagacatttaaggactggccggagatggtagagaatatcatcccatttattggcggagaagaagaaaaaagcgagcaggagccgcttcgcgtacttggcaaagtagaggatggccagatcgtaaaagcacagcttccaaagattacctgccagtgtatccgggttcctgtattgaacggacatacggctgccgtgttcattaacttcgagaagaagccgaccaaagagcagctgattgagaaattgacgagttataagggatttccgcaagaggccgatcttccaagcgcacccaagcagttcgtgcgctatatggaggaagataaccgtccgcaggttacgctggatgtagactatgagaacggcatgggagtgtctatcggacgtctcagggaagacacgatctatgactacaagtttatcggcctttcccataatacagtccgcggcgcggcaggcggcgcagtgctctgcgcagaggctttgacgtcaaagggatatatcaagagcaaataaagatagagaaagaaggaatccgaggccttttgcgcaggcatccgggttcctttttcccttttcaacaatgccggttagtgttaaaataaaacaaagattatgcgcagactaaatttttgaaggatttaccaaagtttaacttatatctaataaaggagagcctgttgtctggtatgatagaggcatacgaatgagatgataggaaaagagggtgtaaattatgaaggaagatatcttaaactatacgcagaacagggaactgtcatggcttaagttcaaccagagggttctggaggaggcgcaggatccgacagttccgcttctggagcggatgaaatttgtcgcgatattcaccagtaatctggatgaattctttatgatccgcgtcggaagcctattcgacatggcgcagacggatgcgaacacagtggacagccgttccggcatgactccaagggagcagctggataagatattcgaagcagtagcccctctctacaaagagcgggacaagacttatgcagacattaagaagcagctgcatccatatggcgtatgcggactggattttaaagaactggagcagtccgagaagaaatacgtgaaaaaatactttaaggagcaaattcttcccattctatctccgcagatcgtggatgcgaaccatccgtttccccacctgctcaataaggcgctgtatgtgaccgccagcctcagatataaggacaagatcaaggaaaagacgatgcttggcattgtcccggtacccgaatttgtctccgatatcctctatcttccgggccatgatatccgttatatccgtatggaaaaagtactgatggaatacgtagatatcgtgttcggacagtatgaagtgtcggatgtcaattacatctgcgtaaccaggaatgcggatatcgcgccggacgatgaagcgctggaagtcagcgacgacttccgctatcttatgaaggagacgctgcataagcgccgcaggatggcggtggtgcgtctggaggtggcagaaaagttcagcccggatatggaaaagtatttctgcgacaagttcaacatcaagccgaaccaggtgttcaggaccaagatgccgatgaagctggattatgtgtttgcgatcagcgggaatctgccggattccatgaagcgctccctgatctattccccattttcaccacagaattccgcccatgtgcaggaaggcagcgtcatgaagcaggtgaaaaagaacgatatcctgctgttctatccgtatgagagcatgaatcccttcctgcgcctgatcaaggaggcgtccacagatccgaatgtgctgaccatcaagattaccatataccggctggctaagaaggccaggctggtagaatatctatgtgccgcggcagagaatggaaaagaggtgacggtgctgatcgagcttcgggcaagattcgacgagcagaataacatcgactggtctgagcggatggaggaggcaggatgcagggtcatctatggatttgagggatataaggtgcattcaaagatctgtctgatcacataccgcaaccggaatgagatccagtatatcacccaaataggtaccggcaattataatgagaagacggcggctctttatacggacctgtgcctgatgacgggcagcaagacgatcggaaaggatgcggcggaattcttcaagaatatgtccataggcaacctgaatggaatctatgatcacctgatcgtgtcgcccacaagcctgaagcagaaggtgctctatcttatggacgaggagatccgcaagggaacgtccggccgtatcgtgatgaagatgaattcgctgacggatgtggattttattgagaaattggcaagggcatcccaggcgggagtaaaagtagacttgattgtaaggggaatctgctgtatacttccaggagtaccgggatacacggacaacttaagagtcatgagcgtggtaggacgctttctggaacatccgcgtatcttcagtttcggtactggcgtagagcagaagatctatatcggttctgcggacatgatgacgagaaatacggagaaacgcgtcgaagtggcatgcccggtgcttgatgagactatcaggcgccagatcaaccactatatgagggtcatgcttagtgacaatgtgaaggcaagagtgcttcaaagcgacggcacgttttgcaagaaagacgaggaaaagccgccaatcgattcgcaggcagtgttcatggaagaagcaatccacgcaaagcgaagcgcgcctgtaaaggaaaagtcgattggagcgtggctcagagcgttctttaagagataaaggagttagattatatttatggggaaatcactttatattgctgagaaacccagtgtggcacaggaatttgccaaggcactgaagataaagacaagaagggcagacggatacctggagtcagaggaagccatcattacctggtgcgtagggcatctggtaacgatgagctatccggaagaatatgatgcaaatctgaaaaggtggagtttggagactctgccttttataccggaggaattcaaatatgaagtgattccggcagtgtccaagcagtttcggatcgttgccggacttttaaacagggaagacgtggacaccatctacgtgtgcaccgactcgggacgagagggagagtatatctaccgtctggtggagcagcaggcaggagtccatggtaaagagcgaaggagagtctggatcgactctcagaccgaggaggagatattaaggggaatccgggaggcaaaaaacctggatgaatatgataatctttcagcttccgcatatctgagggcaaaggaagattacctgatgggaattaatttttcaaggctccttaccttgaagtatgggaacagcatttccaattatcttcataccaattattccgtcgtctctgtgggccgggtcatgacctgcgtccttggcatggtggtcagaagagagcgggagatcagagaattcgtggagacgccattctaccgggtgatcagcacgattggcgagacggggcagagttttgagggagaatggagggccgtaaagggatcaaaatggtttgaatcgtttgacctctacaaagaaaacggctttaaagaacgggagaaagcagaacagctgatcacgtatctgagtgatccgaagcccatccagtgccagatcgtatccattgagaagaagaaggaaaagaagaacccgccgcttttatttaacctggcggaacttcagaatgaatgttccaagcgttttaagatcagtccggacgagacgcttcgcatcgtacaggaattgtacgagaagaaactggtcacctatcccaggacggatgccagagtcttgtcaacggcagtggcaaaagagatccataagaatctgaatgggcttatgaagtatgggccggccgtaccgtttcttcaggatattgtggccctgggaagccacaagggccttgaaaagaccagatatgtcaatgataagcagattaccgaccattacgcgatcattcctacgggccagggcattaatgccctgggctctctgaaccatctggccagccaggtctatgacgtagtcgtgaagcgtttcctttgcatcttctatcctccggccgtctatcagaaggtggccattgtgaccgggatcaaggaagaatcctttttctccaattttaaggtgctggcagaagaaggatacctgaaagtggcaggacttccccaggcaaagaaaagcgcggcggaggcagaagaggaaaacggagaaaaggatacggacacggcattttttgagaaaatacaggccctaaaaaagggcatgattctccaggtccagtcattagatattaaagaagggaagacgtcgccgccgaagcgttacaattcaggatcgctgattctggcaatggagaatgcggggcagctgatcgaggatgaggaactgcgcgcccagatcaaaggaagcggcatcggaaccagcgccaccagaggcgagatcttaaagaaactcttccataacaaatatcttgccttgaataagaagacgcagattgtgacgcctaccatgctgggagagatgatctttgacgtggtggagaactccattcggtcgcttctgaacccggaactgacagccagttgggagaaagggcttacatacgttgcagaaggagagatcacgccggatgaatatatggaaaaactcaggcattttatcgtaagcaggacccagggggtcaagggcctgtataaccagagccagctgcgctcctgctacgacaggaccgcgcagttttacaagaagccggcgcaggcaaagaaggcagcaaagaaagaatctaaatagcagagaggagacaaaagcagcatgaaggaattaacagtagccagcttgtacacacttgaggaaaccatcgcaaaggacttgtttgaaggggtagagtatccctgggaggtgcttccgaagatcagcagcttcatcctggaactgggggccgccctgccggaagatgaatacgacaaggtgggagaagatgtgtggatcgccaagtcagccaaggtatttgagtctgcatatatccatggcccggcaatcatcggcaaggacgcggaagtcaggcattgcgcttttatccgtggaaatgccattgtcggcgaaggcgccgttgtgggaaattctacagaacttaagaatgtggtcctgttcaataaggtgcaggttccccattataattatgtaggagattccattctgggatataaggcccatatgggcgcaggctccatcacatccaatgtaaaatcagacaagaaactggtggttctaaagactccggatggaaatatcgagacgggaatcaagaaattcggggctatgctgggggatgaggtggaagtcggatgcggaaccgtcctcaatccgggaagcgtggtcgggaagtgcaccaatatctatccgctttccagcgtaagaggctacgttccggccgggagcatatacaagaagcagggagaagtagtggagaagatataagataagcgtcctttcggacaggaggatatcagatgaagaaaataggatttatcggcgtaggcattatgggcaagtctatggtgagaaatttgatgaaggcaggctttgaactgcatatctatgcccgcaccaagtcaaaggtggaagatgtaatcagcgaaggggcagcctttcatgaatcgatcagcgaatgtgttaaagattgcgaggcagtgattaccatagtcggattcccgaaagatgtggaagaagtctattttgacgaaggcaatatcttagacagcgcgagggaagggacctacctgattgatatgacgaccaccagcccgatgctggcgcagaagatatatgaagcagggacgaaaaagggattccatgtgctggatgccccggtaaccggcggggataccggagcaaaggccggaaccttgtccatattggcaggcggccggagggaagattacgaagcctgccggcccttatttgaggcaatgggcacgaatatcaactatcaaggagaggcgggctgcggccaacatgccaaacttgccaatcagatcatgattgcgggaaccctttccggcgtgtgcgaggctattacctatgcaaaagccaaggggctggatcttccaaccgtccttagatccgtctctacaggggcggcgggaagcaagcagctggatatcttcggaccgaagatactggctgaggattatgcgccaggcttcttcatgaagcattttatcaaagatatgaagctggctcttacagaagccaatatgagcgagttaagcctggatgtattaagccaggtgctggccaactgtgaagaactggaggcagaaggctacggggatctgggcacccaggccctgatgaaatactatgaggaatcccaggcctaagaggtgctgttcttgtaatgcccgggaaagtatagtaagatagagacgtacacgatgaaaggagtgataacatgttagaagataattatgtaacatttgaaataggcaaagcaaagcatattgcactggtagcccacgatggcaagaaaaaggaactggtagactggtgcgacaagaataaggatgtgctaaaaagccactttctgtgcggaaccggcaccacggccagactgatcgcggagaggacaggcctcccggtcaaaggatacaacagcggcccgctgggcggcgaccagcagattggcgccaagatcgtggaaggccagattgacttcatgatcttcctgtgggatcctcttgaggcccagcctcacgacccggatgtcaaggctctgcttagaatcgcagtcgtatatgacatcccgattgccaacaacctggctaccgcggactttatgctgaattccaagtttatgaatgatacttacagccgcagggtggagaatttcaataagacgatccaggagcgggtggagaagatgaagtaatattttggtgattgaattgggggggacggtagatggacggtcttaggagggtgcaccccggcctgccttctactctcttcgccagaactttgtaatttcaaatacagcctaaatatagaaaccgagtctattcgataggaaattttgataatttcccatctcagaggctcttggggattttgcctgatgcaaaatccccattctatatttgggctgtattttcagtaacaaagttcaaggcttgttcgacgaaaataggccggggtacatcctcctaagacctgacctctacagcctccaggaaattcaattggaggaaatctgaggagaatagttaatttggtattgacaggggggattggggtgtggtattctaagtaggcattaaactttagtgctttaaagcgcaacggtttaaagcgacgaatagactggaatgaaaggtgagggaaagattatgggtattaagttgatgctgctgattgtattttttgttgttatggtggcggtagggctttattcaaggaagcatgcaagaagcgtagacggattcgtgctgggagggcgttctgttgggccgtggctcacagcatttgcttatggtacttcatatttctctgcggttgtgtttgtcggatatgccggacagtttggatggaagtatggcttggcatctacctggattgggattgggaatgccgtgctggggagtctgctggcgtgggtcgtgctggggcgccgtactaaggttatgagccagcacctgaagtctaagacgatgccggacttctttggtgaaagatatggaagcaaggcgcttaaaattatggcgtccgccatcgtattcgtgttcctggtgccttacacggcatctatctataacgggctctccagattgtttgagatggcctttgacataccttatacatactgcgtagtagtaatggccgtatttacagggatttatgtaattcttggaggatacatggctacggcgatcaacgattttatacaaggaatcattatgctgattggcattgtggctgtgattgccgccgtgcttagcgggcagggaggcttcatcgaggcggtaaggaagatggcggaacttcccagcgatgttccggtcaccatgggacagccgggcgcatttacttcttttttcggaccagatcctctgaacctgctgggcgtggtgatacttacttccctgggtacctggggacttcctcagatgatcgggaaattctatgccattaaggacgagaaggcgatcaataccggaacggtgatctcgactctatttgcctgtgtggttgccggtggaagttactttctgggaggatttggacgcctgtttgacggcaaggcgatctatgatgagacagggaatgtggtgtttgacaggattatcccacatatgctgtcatccctgccggatattctgatcggcatcgtcgtggtgctggtgctgtcggcttcgatgtccacgctggcatccctggtactgacgtccagctctacgcttacgctggacttcctgaaggataatgtgatcaaggatatgagcgagaagaagcaagtgcggaccatgcaggtgctgatcgtattcttcattgtggtttccgtagtgatcgcattggatccgccaacctttatcgcccagctgatggggatctcatggggggctttggctggcgcgttccttgcgccgttcctgtatggactgtactggaggggtgtgacaagggctgcggtatgggccagttttattgccggcgtaggcattaccgtatccaatatgttcctgcactatattgcatccccaatcaatgcaggggccatcgctatgatcgcaggactggtggtagtgccggtggtcagcgtagtaacgccaaaacttaagaaggatcgggtagaggatatcttcagctgctacgaggagaaggtaaccattacaaagaaacgttcgctggaagccaattaagcagcagagaaaacggaataaaatagatcaaggaaagtgattaaaaatgtcactttcctttttcttattcatatgttaggataagggggtattaaaaaacgacaataaaattgatgattattattcaaaataatgatagaaggagaggaaaatcacatgaaaaattatcagaagtatgagaaatcgtattttatgcctccggttgctacttacgattgggcaaggaaggactctatagagaagccgccgatctggtgcagcgtagacttgcgggatggcaaccaggctttgatagagccaatgagtttggaagaaaaattggagtttttccagctgctggtggatatcggatttaaggagatcgaggtgggattcccggctgcatccgagacggagtaccagtttatgcgtacgttgattgaaaagaacatgataccggatgatgtgacggtacaggtacttacgcaggcgagagagcatattatcaagaaaacctttgaagcggtcaagggagcgccccatgcggtcatccatttatataactccacatccgtagctcagagagagcaggtatttaaaaagagcaaagaagagattaagaagatcgcggtggacggcgcaaaactgctgctggaacttgcatccgagacggatgggaacttcaccttccagtacagcccggagagttttccgggtacggaagtcgactatgcggtggatgtctgcaatgcggtgctggatgtatggaagcctacggcagataataaggcgatcatcaatattccgacgacggtcgagaatgcgatgccgcatgtgtttgcctgccagctggaatatgtggataagaatctgaattaccgcgacaacgtgattctctgcctgcatccgcataatgacaggggctgcggcgtcgcgactgcggaacttggtattctggcaggagcggaccggatcgaagggaccttgttcggcaacggcgaacggaccggaaacgtggatatcgtaacgctggctcttaatatgtattcccacggcgtggatcccggactcgatttctcggatatgaaacgcatccgggagacctatgaacggctgacccgcatgcatgtatatgaacggcagccttatgcgggagacttggtatttaccgcattctccggctcccaccaggatgccatcgccaagggaatggcatggagagaggataagcggcgtgacaaatggacggttccgtatcttccgatcgatccgcaggatgtggggagaaaatacgattccgacgtcatccgtattaatagccagtctggaaaaggcggcgtgaactacatcctgaagcagagccatggaatcaatctcccgcagcagatgcgcgaggaggtaggatatcttgtaaaagatgtatccgacaaggcgcataaggaacttgccccagaatgggtataccagatattctctgataattacattaatacaaagccggtgttccatattgatgaatgtcacttccagcagctggatggcattacggcggaagttacgatcaaccatggaggggagagcagagccattactgccatgggaaatggacgcctggacgcagtaagcaacgccatcaagcagtactttaatatcagttatgaactgacattctacgaggaacactccttgacaaaaggctcttcctccaaggcagtggcttatgtgggcattatctgcaaaggcaagaccttctggggagtaggaatagatgccgatatcattcgggcatccattgaagcgctgatcgtggcggtgaataagatcgaggagattggaaatgcagatgcctgcaaggatgcgagaatgattgagatcatgaactatatccaggcaaattatattgacattaccctggatgaccttgcggagaagttcttcctgtcaaagccatatctgtcaaaatacatcaaggaaaaatcaggaatgacatttggcgaattggtaaagaagatccggatgaagaaggcgaaagcgttgttaaagagcagcaacatgacggtagaaaatatcgcgctgtccgtgggctaccagaacgtggaacattttaaccgcctgtttaagaaagcatacaatatgactcctatgcagtttcgaaaccagaaatagcgaaaataaaaaggccgcttaacggccttttttctgtgtagtcaatggataacgctttattctgccttagccagctgatcgagcctgccgcttaatagccagaggatgattcccatcacaatgacgatggcagccacgatcccatatccgatctggaagggaacggtcttaaggtacgcatagagcttcggatagatcagcgtcgcgaaaaatacggcaattggccagaatccgagaagcgcgcctatgactttggccggcgccagcatggtgataaaggaattcccaagtggcgagaataccatctcaccgatggacatcagaagggataccagaacgatccacagaagggagcactggcctaagtgaaggccacgaagagtgcagccacaagggaggcatctgcatctgtaagtcccaggccgcctccagcggcattggtggcaatctagattgccaggagatatttgactgtatagaacgcgcagcgttcgaatgtaaagcctatggcacatacgtagatgccaaggggccgtttctttttgctaactgcagtttccattattatcctccaaatctgtaagtgtttttgtgggtctaatatatttggggataaaggagggctatatatacggttctgacgaaaagttgtggagaaagaggaacgtcaattttttaacaaaaaataagcaataactattgcagtttcttataaaaatagatataatataattggcaaaaatttggttttacttttaaaatatttggtaaaaacctatttaaaatatgtaagaaaatggagggctagactatgggcaacatggcaacagaaaatgcagcaggcgcaagaatcagttctttgcttgatgcaggcagttttgttgagatcggcggggcagtaactgccagaaatactgatttcaacatgcaacaaaaagaaactccggctgacggcgtaataaccggctatggagtgattgatgggaatttggtgtatgtgtacagccaggatgcatccgtattaggcggtgcgatcggcgagatgcatgctaagaagattgcgaatatctacgatatggcaatgaagatgggtgcgccagtgataggccttgttgattgtgccggcttaaggctccaggaagcaacggatgcgctggatgcttttggaagcctctatctgaagcaggccatggcttcaggcgtgattccgcagattacagcgatttttggaacctgtggaggaggactctctgttattccggcactgacggattttacgttcatggaaaaagacgcaggaaagttattcgtgaattcgcccaatgcgattcctggcaatacggctgctaaactggacacgtcttccgcagaattccagagcgagaagtctggccttgtagatgatatcggatcagaggaagagattcttgagagtatccgctccctggtctgcatgctgccatgtaataatgaagaagatgcttcttatgatgaatgcgcggatgacttgaaccgtgtctgcgaaggaatcgagaatgcagctgaggatacggctattgccttgacacagatatccgactgccagatcttctttgaggcaaagaagcactatgcaaaagatatggttaccggcttcatccgtctgaacggcatgacggtaggcgcggtggcaaaccgttcaaaagtatataacgaagaggcagaagtcgtagaagagtttgacggatccctgtccgcgaaaggagcagaaaaggctgctgactttattacattctgcgatgccttcaatattcccgtacttactcttaccaacgtgtctggattcaaggcaggcaaatacgaagaaaagcacctggccaaagatacggcaagacttgcgtacgcgtttgccaatgcgacagttccaaaggtaaatgtcatcatcggaaaatcctatggaagcgcctatgtagccatgaatagcaaatctattggagcggatatggtatatgcatggccgaatgccgagattggcatgatggaagccgctcttgcggccaagatcatgtacgctgattccgattcagacacgattaaggaaaaagcggcagaatataaagaattgcagtcaagcccattatctgcagcaagaagaggatatgtggataccatcatcgagccggcggatacgagaaaatatgtaatcggagcattcgagatgttgttcacaaaaagagaagaccgtccgatgaaaaagcatggtacggtttagagaggtgaggcaaagtgaggaaaaaaattagcttattactctgtgtacttgcagcgatgctctgctttaccgcatgcggaagcagcaaagaggcggttgaatatgatgaagccagcatggaacaagtgacagaattcttgattgaatattgctccaatgccgatgatgccatgatggagcagtggagcgacatgtctgagttcaacatgaacctgcagctgacgcaggcaggccttccgatcgagccggagagtttcgtctccgctatggatgcatggaaggctgctgtgaaggaatgcggcaattatgtgagccatggcgactatacctatgaggcttccggcaaggaagtaaaggtatcgacagaggcagagttcaaagaccgtgacgcgatgatcacgtttatatttgacgataggctgtatctggacagcatgaccgtcgatgccgaatatacgacaggcgagatattggaaaaagcgggacttaatacggtgcttggaatgggaacagtgtttgtggtattgattttcatttcactgattatctccttattcagatttatccctgcgattgaaaatgcattcaagaagaagcctgcagcggaagttaagaaggaaagcattccggcagctgacgcggccgtaccggaagtccagggttctgaaacagatgatacagagttgattgcggtgatttcagcggcgatcgcagcggcggaaggcaccagcacggatggatttattgtgcgcagcatcagacgccgtccatcgaataaatggaattcataaagcaaacaggaggattagaaagatgaaaaactatacaatcacagtaaatggcaacgtatacgacgtaacagtagaagaaaacgcagcgggagcagcaccagcagttccaagagcggcagcgcctgcagcggctcctaaggcagctccggtggctccaaaagcggcggcgccagcggcaggggcaggctccatccaggtaaaggcaggagcagccggcaaagtattcaagttggaagcaagcgttggacagagcgtaaagaagggcgacgcagtcgtaattattgaagcaatgaaaatggaaatcccagttgtggcaccggaagacggaacagtagcaagtattgacgtagctgtaggagatgcagtagaatcaggcgcgatattggctactttaaactaggacatagtctggctatgtctatctaacacgactggaggttaaaaaatggaatatataacaacgacattaggaaacctcgtgcatcagacagcatttttcagtcttacatggggcaatgtaattatgattgcggttgcatgctttttcctatacctggcaatcagacatgggtttgaacctctgctcctggtaccgatcgcgtttggtatgctgctcgtaaatatctatccggatattatgctgcatgcggaagatgcagccaacggaaccggcggacttctctactacttctatcttctggatgagtggtcgatccttccgtccttgatcttccttggcgtaggcgctatgacagacttcgggcctctgattgcgaatcctaagagtttccttctgggggcggctgcgcagtttggaatctttgccgcataccttggagctatggcaatgggattctcagataaagcggcagcggcaatctccatcataggaggagcggacgggccgacatccatcttcctggccggaaagcttcagcagacggccatattagggccgattgcggttgcggcatattcttatatgtcattggtaccgatcattcagccgccgatcatgaagctgctgacgacggaaaaagaacgaaagataaagatggagcagttaaggccggtttccaaactggagagaatcctcttcccgatcatcgttacgatcgtggtatgctcgatccttcctacgacggctccgctggtgggcatgctgatgcttggcaacctgttccgcgagtccggagtggtaagacagcttacagagacggcatccaatgcattgatgtacatcgtagtaatcctgctgggaacgtctgtgggtgctaccacgagcgcggaggcattcctgaattgggatacgctcaagatcgtggccctgggacttgcagcattcatattcggaacagctgccggggtattgttcggaaaactgatgtgtttctttactcatggaaaggtaaacccgctgatcggctcagcaggcgtatctgcggttccgatggcagccagggtatcccagaaggtgggagcggaggcagatccgaccaacttccttctgatgcatgcgatggggccaaatgtggcgggcgttatcggcacggcagttgcggccggtacattcatggcgatctttggcgtaggcatataaatgtaaagttgaatattaggaggatataaaatggcagaaatagagaaaaaaccggtaaagattacagaaaccgtcctgcgtgacgcgcatcagtcattgatcgccacacgtatgaccactgagcagatgctgcccatcgtagaaaagatggataaggtgggatatcatgcggtagagtgctggggcggcgctacttttgacgcatcccttcgcttcctgaaggaagatccatgggacagactccgcaagttccgcgacggattcaagaatacgaagctgcagatgcttttccgtgggcagaatattctgggctaccgtccatacgcggatgacgtggtagaatattttgttcagaaatccgtagcgaacggaattgatatcatccgtatctttgactgtatgaatgatatccgcaacctccagactgcggtcagcgcggccaataaagagaaggcagatgcccaggtggccatgtcctatactctcggcgacgcttatacgctggagtactgggttgaccttgccaagagaatcgaggatatgggtgccaattctatctgtgtaaaagatatggcaggcctcctgtgtccataccaggcaaccgagctggtaacagcgcttaagggagcggtggatattccgatcgagatgcatacacactatacgtcaggcgtaggggcaatgacatacatgaaagcaatcgaggcgggcgcagatatcatcgatacggccatgtctccatttgcaatgggaacgagccagccggcaacggaagttatggtagagaccttcaagggaacgccatacgatacaggccttgatcagaatctgctgtcagagatcgcggactacttccgtccgatccgtgatgaggcgctggaaagcggccttctgaatccaaagaacctgggcgttaatatcaagacattactttatcaggttcctggaggaatgctctccaacctgacttctcagttgaaggagcaaggtgcggaagacaagttctacgatgttctggaagaagtgccgagagtaaggaaggacctgggcgagccgccgcttgttaccccgtcatcccagatcgtcggaacgcaggccgtattcaatgtgctgatgggcgagagatataagatggcaaccaaagagacaaaagacgtattaagcggaaaatatggcgcgacagccaagccgttcaatgaagaggtcagagagaaggtacttggcaaagatgcggaaatcattacctgccgtccggcagacctgattccggatgaattagacaccttgcgcaaagagtgcgagcagtggatccagcaggatgaggacgtgctgacctacgcgctgttcccgcaggtggcgacagacttctttaaatacagagaagcacagcagacaaaagtggatcagaccatagcggatacgaagaatggcagctatccggtttagacaagcgtaaagccgggcccgggagatagtcactgataacagtccctacctcccgggcttatattattgcaggatggacaactcatgaatttacttgaatatcccggaattaggatatataatggaaacaatgttaatttgagaagaggaatatgctatatgggaagcaagaatgagttgttgaagaaaatagatgaaggctatccgaagttcagcaagggccagaaaaaactggcagactttattcgggaagactacgacaaggcggcttttttgacggcggccaggatgggagaggaagtaggcgtcagcgaatctaccgtagtccgttttgccactgcccttggatatgatgggtatccgggctttcagaaggccctgggagaactggtccgcaccaagctgaattccatccagcgcatggaagttacttatggcaggatcagccagggagagatccttacatccgtcctgcagtctgatattgagaagatcaagatgaccatggcctccattgatcatgaagtgtttgaacttgcggtggataccattctcaatgccggaaggatctatgtgatcggcatcagaagctgcgccccgctggctaattttctgtgtttttacctgaatctggtgtgcgggaacgtgacggtagtcaataccaatggatccagcgagatattcgagcagatcatccggatcagcgaagaggatgttattatcggaatcagttttccaagatattccatgcggacgctgaaagcactggaatttgccagcaaccgcaaggccaaggtcattaccttgacagacagcgtgcattctcccatcactttgtattcttcctgcaacctgatcgccagaagcgatatggcgtccatcgtagactctctggttgcgccactgagtgtggtgaatgccctggtagtcgcgctgtgcatgaaaaagcagaaggaagtcatctctacgcttgagacccttgagcagatatgggatgaatatcaggtttacagcaaggatgaacttaatatggtgaatgataaggttgaattatccgtccccggcgagcaggaggatgaagaagatgagtaaggtcttgattgtaggaggaggcgcagccggcatgtttgcttccattgcggctgcaagaggcggccatgaagtgctggtctttgagaaaaatgagaagttgggcaagaaactcttcattacggggaagggaagatgcaatattaccaatgcatgcgatatggatactctgttttcatcgattgtcagcaattccaagttcctgtacagcagtttctatggatatagcaaccaggatgtcatcgatttctttgaaggactgggcgttcggactaagattgagcgcggcgagagggtctttcctgcgtccgaccattcttccgatgtcatcagggccatggagaaggagatgaggcgccttggcgtgaaggcagaactgcatgccgaagtgacagccgtccggtccgggaaagggaggtttgaccatatcgaactgtccggaggcaggaaggtgacaggagatgcctgcatcgttgccacaggaggcctgtcctaccagtttaccggatcgacgggagacggctaccgttttgccgaggagaacggccacaggattacggagcgcatgccttccctcgtgccaatggagataaaggagccgtgggtatccagtctacagggcctatccctcagaaatgttacggccaccttatatcagggcaggaaggaagtctaccgggaattcggcgagatgctgttcacccattacggggtcagcggtcccattatcatcagcgccagcagttatgttggcaagaagctaaaggaacaggaaatgcgcctggagatagacttaaagccggcgctagatgaagaacagctggatcacagattgctcagggactttgaggctaatgccaataaacagtttaagaacgcgttaggcaggctgtttccgtccaaattgattcctgttatgatacaattaagcggaattgacccggagaaaaaggtaaacgtcatttccaaagaagaacggcgagccttcgtgcatctaatcaagcatctgccgatgacggtgaccgggcttcgcggctacaatgaggcgattattacgaaaggcggcatccgcacaagggagattgatcctggaactatggagtcaaagcaggtaaaaggcctgtactttgcaggcgaggtactggatctggatgcgctcaccggagggttcaacctgcagatcgcatggtctaccgcatatgcggcaggaagcagtatagagtaaaagaagcgaggagagatacaatgggttataatgttgcgattgatggtccagctggagcaggaaagagcactatcgccaaacttgtggcaaaggagaagggttatatctatgtagatacgggggctatgtaccggggaatggcgattcattttcttgataagggcatccgggcaaaagagacggataagatcataagtgccttaaaagacgcagaggttacgatccgttatgaagagggcctccagcaagtctacctgaacggcaggaatattacggacaggcttagggaggaagaggttggcaagatggcttccctgacctcggcgatcccccaggtccgacagaaactgctggaactgcagaaaggccttgcccgtacgcaggatgtgatcatggatggcagggatattggtacctgcgtgcttccggatgcggatgtaaagatatacctgactgccagcgtggagacaagggcaaagcgtcgttatgacgagttgacagaaaaaggcattgcctgcgatctggatgagatcgagcgcgacatcaaggagcgggatgagagagattccaccagggaaatcgctccgcttaagcaggcagaggatgcggtgctgatcgacagttcccatatgacgatagatgaagtggttgcggccatcgttaagttgtgcagataagcatagatgagaagaggatgaaggatgaagattgagttggcaaagaccgcaggattctgcttcggcgtaaggcgggcagttgagacggtatatgaacaggtgaaacaccatcagggcgagaagatatacacctatggaccgatcatccataatgaagaggtaatcaaggatctgagacgccaaggcgtggaagtcatcaattcggaagaagagctggaaaaactcgaagaaggagtcgtgatcatccgctcccacggagtccccaaggccatatacgacaaactggaagagaagggtttagactgcgtggatgctacctgccccttcgtaaagaaaatccataatatcgtggctgaagaaagtcagaaaggatcgcacattgtcatcatcggtaatagcgagcacccggaggtggaaggcatcaaaggctgggcaggagatgacgtgacggttatccagacagcagaagaggcgcagcattttcggcccccggatacagcccggaggatatgcgtagtttcccagacgacatttaattacaataaattcaaagaattagttgaaataatcacaaaaaaagagtatgatataattgttttaaatacgatttgcaatgcgaccaaagaaaggcagcaagaagcccgtcagattgcagagagagtagatgctatgattgtcatcggagataagcgtagttcaaatactcagaagttatttgaaatttgcggaaaggcatgtttgaatacgtactatatacagacacttgacgattttgatatgaatcaattaaggtccgtggaaacagtaggtattacagcaggggcatccacgcccaacaatataattgaggaggttcaaaataatgtcagaattaacttttgaacaaatgttagaagagtcttttaagacaataaggaatggagaggtcgtagatggtacggtcatcgatgtaaagcccgatgaaatcatcttaaatatagggtacaaggcagatggcatcatcacaagaagcgaatacaccaatgaggccaatgcagatttgaccacaatggtttccgtaggcgatgagatgactgccaaagtcctgaaagttaacgatggcgaaggtcaggtgctgttgacgtataagagacttgcggctgaaaaaggcaatgagaggctgaaagaggcgtatgagaatcacgaggtgctcaaagcgcctgttgcgcagattcttggcggcggattgagcgtagtgattgatgaagcaagagtatttatccctgcgagccttgtgtcagatacttatgagaaggatttgagcaaataccaggatcaggagattgagtttgtcatcagcgaatttaaccctagaagaaaccgggtaatcggcgatagaagacagcttcttgtggctgagcgcgctgagaaacagaaagagttatttgcaaggcttcaggttggagacagaatggaaggaactgttaagaatgtaactgacttcggagcgtttattgatcttggcggagttgacggactgcttcatatctctgagatgtcctggggacgcgttgagaatccaaagaaggtattccaggttggcgagaaggtagaggttctgatcaaggatatcaatgatacgaagatcgctttgagcctgaagttcccggagacgaatccgtgggcgaatgctgcggatgatttcgcggtaggcaaagtcatcgaaggaaaggtagcaaggatgacagactttggcgcgtttgtagagttagcgccaggcgtggacgccctgctacatgtttctcagatttccaaggctcatgtagataagccatcagacgtattgtccgtaggccaggtgatcacggcgaagatcgtagatctgaacgagtctgagaaaaaaatcagcctgagcatgaaagcgttagagccggcgaatgaagagaaggcacagccgggcacagaaagcgtggaagaagttgcagaagaggattcagcagaataggcaaaaggtcgaacataatagaagataggagatagaggcccggtggcctctatcttttatgtgttaaaaattcgacaagatgttcgtggaaatatacaaaaatttgcccgatatccactggataaactgggcattttcatgtatagtatataaagagtaaaaaggaaggaaggaaaaagggatggcattgttaacatttaagggtggcatccacccggatgacggcaaaagcctggcaaaagacaaggcgattgtcgaagtaaaacccaaaggggatttggtgtatccagtttcccagcacatcggtgcaccggcgaacccggttgtggctgttggcgaacgtgtcttaaagggccagatgatagcagaagccggaggattcgtgtccgcacctatctatgcatcggtttcaggtacagtgaaagcgatcgcaccacatttgaatccgacaggaggaaccgttaacagtatcgtaatcgagaatgacggtgaatatgaggaagttgagtatcctgccgttaaacctctggatgagatgagcaaggaagagatacttaatatcatcggaaatgccggagttgttggcatgggtggcgcaggcttcccgacaagagtaaaactgtcaccaaaagaaccagagaagattgattatattattgcaaactgcgcggaatgcgagccgtatatcacggcagactacagaactattatggaaacgcccgagaagcttgtgggcggaatgaagattgtcctgaagctatttgataatgcgaagggcatttttggcgtagaagataataaaccagattgtattgaaaaattaaaagaattgacgaaagacgagccgcgcatggaagtacttgcgcttaaaaccaagtatccgcagggcggcgagcgtcagctcatctatgcaactacaggcagggcaattaactcagccatgcttccggcagacgcaggatgcgttgtagacaacgttgcgacgatggtgagcatctatcaggcagtagtagaaggaaagccgtctatggagcgtgtggttaccgtcagcggcgatgcagtgaatgagccaggcaacttcagggttccgttcggaatgaaccaggcagaattggtagaggctgcaggcggattcaagactgagccggaaaaactgatttcaggcggaccaatgatgggctttgccatgtttacgctggatgtgccggttacaaagacttcgtcatccattcttggatttaccaaagatgaagtggcacagttcgagccttccgcatgtatcaactgcggacgctgcgtagatgcctgtccgagcaggctgattccgtcaaggcttgcagattacgcggaacaccacgatgaggaggcgtttacttcgcatgaaggcctggaatgtatggaatgtggttcttgcagtttcgtatgtcctgcaaaacgtcagttgaaacaagcaattggctcaatgagaaagattgcgatggcaaaccgcaagaagaaaaaataaataagagagaaaagaggaagaggtgaacaaacgtgagtgaaaacaaattgaaagtgtcatcttcaccacacatacgttccaaagttaccacaggcaatatcatgcttatggtaaccattgcactgctgccggcttctgcctttggtgtatggaactttggactgccggcccttgtcatgctgcttagcacgaccatatccgcagttctgactgaatacatatatgaaaaattaatgcataagaaggttacgatcaatgatttcagtgctgtcgtaaccggtttgctgctgggacttaatatgcctgcatccgcgccatggtggatgggcgcattaggaagcgtattcggcatcctgatcgtaaagcagctgttcggaggactgggacagaacttcatgaacccggctcttggagcaagatgcttcctgctgatttcatttacaggaccaatgacgaagtttatctatgacggcgtcagcgggccgactccattagcgcttctgaaagacggcgagcccgttgatacgatgaatatgctgataggaaagattccaggaaccatcggcgagacttctgtcattgctattattatcggagcaatcttcctgatccttatgggagtcatcgatcttcggattccgggaacctatattgtcacattcgtgatcttcgtaggcatttttggccacttcactaaggctggcgtgggattcttcgatcctcagtacattaccgctcacctgtgcggaggcggactgatgcttggcgcatggttcatggctactgattatgtcacatcgccgattacgaagaaagggcagtatgtatacggagttctgctgggtattctgacaggattgttccgtctctttggcggctctgcggaaggcgtatcttacgcaatcatcatcagtaacctttttgtaccgttgattgaaagggttactcttccaaaaccatttggtaaaggaggagagaaataatgaataagattattaagaatacagtcattctgactttaattactttaattgcaggaatctgcctgggcgcggtctatgagatcacgaaggagcctatcgctcaggcacaggatgctgccaagaaagaagcatggcagcaagtatttccggatgcagatgtaaatgatttcgagcttgttgacgtagatcagaaggctgccgacaaggcaatcaaagatctgggcgtcaaggcgaccattgatgaagtctgcacagtaggagaggaaggctatgtcgtaaccgctacagataaagaaggctatggcggcgacatcaagatcacggtcggcataacagccgatggcacgatcaacggaatctccattctgtctatcagtgagaccgcaggccttggaatgagagcgacggagccggctttctatgagcagtaccagggaaaacaggctgaaaaatttgtagtatccaaagacggcggggacggagagccgattgatgcgttgagcggagcgacgatcacatcaagagcggtaaccggagcggtaaacgctgccttaggctattaccagaatgcgttttaggaggtagttaagatgaatagatgtaccgaaagagtttataacggtttagtaaaagagaatcctaccttcgtcctgatgctgggcatgtgtcctacgcttgccgtaacaacatccgctatcaatggcctgggtatgggtctttctacaacagtcgtattagtattatctaatatgctgatcgccatgctgcgcaagattataccggattccctgagaatcccggcgttcatcgtagtcgtggcatcattcgtaacaattgtacaattcttgctggaaggttttgttccaagcctttatgatgctttgggaatctacattcctttgattgttgttaactgtattatcctgggacgtgcggagagttacgcttccaagaatccggttctgccgtccatctttgacggcattggcatgggccttggattcacggtaggccttacagcgatcggtatcgtgcgtgaattgatcggatccggcaagatcttcggataccagctgattccactggctgacgaagcggctggcaaggccggctatgtcccggttacgatctttatccttgcgcctggcgctttccttgtgcttgcaggactgacagcccttcagaacaaggtgaagaataacgcggccaagaagggtaagaaagttacagaggcagcgtcatgtgcagaaggatgcgcttcatgcagcaacggcgcatgcagtgggaaggtcttcccgacaggaaacgaagagtaggaggagtacatagatgaaagaattattgattattgcaataggatcagctcttgttaataacgtcgtactcagccagttcctgggtatctgtccattccttggcgtttccaaaaaggttgagactgcatccggcatgggtggcgcagttatcttcgttattacgatcgcgtcctttattgcaggactgatttataagtttatactgataccgctgcatttcgaatatctgcagactatcgtatttattctggttattgcggcgctggttcagtttgtagaaatgtttttaaagaaagccatgccggccttatataatgcgctgggcgtgtatctgcctttgatcacgaccaactgcgcggtactcggcgttgcgcttacaaatgtacagaaggaatattcgattgcccagggcgtaatcaacggtattggaacatctgccggattcgcgcttgcgatcgttatcctggcaggtcttcgcgagaagatggaatacaacgatgtgactgagtctttccagggaaccccgattgtgctgatcacggcaagccttatggctatcgcgttctttggattctcaggactgatataggagggagcaggctatgagtataacaggtattattattgctgctgcaatcgtaggcggcaccggattattcattggtgtgttccttggaattgcaggtaagaaatttgcagtagaagtagatgaaagagaagaggcaatcctcggcgttcttccagggaataactgcggcggctgcggctacgcaggatgctccggactggctgcggcgatcgtcaaaggcgaggcagagattggcggatgtccggtaggaggcgctccggtggctgcaaagattggcgagattatgggccaggaagcaggagaacaggttcaccaggttgcattcgttaaatgcgcgggtacttgtgacaaggcacagcaggaatacgagtatcacgggctgggagactgtattatggcaaacatgatgcaggacggcggaccgaaggcttgtaattatggatgtcttggagaaggaagctgcgtaaaggcatgtccgttcgacgcgattcatgtggtagacggcgttgccgtggtagataaagaagcgtgcaaggcctgcggcaagtgtatcgccgtatgtccgaagcatctgatcgaactggttccgtacgaccagaagcatctggtacagtgcagttccaaggataagggcaaggatgtcatgaaggcatgctcagtgggatgcatcggatgcaagatgtgcgagaaggtctgcgagtttgacgcggtcaaagtggtagacaatattgcgcatattgatcctgagaaatgtacgaactgcggcgcgtgcgcgcagaaatgtcctaagaagatcatattataagacatatataaaggcgtatattggatgaaacgtactctaaagcaaataatgcgcgatgcgtatgcattgctgtggaacgatatcaagcaggcaaaatgggtgattatttttatgatcgcctattttgcgttcatgaaaaactttttatacagtacgtgcccatccgtgctgctgacaggatatccctgccctgcgtgcggcatgacccgggcggccttctgcctgtttaggatggattttaaaggggctttttccatccacccttttatctatgcggtggcggcgtacgtggcagtctttgcggtaaaccggtatattctgcaaagaaaaatgggcaagattcttaaactggcgctggcagggatcatggcaggcatgattgtctactatctatggagaatgatcctatattttccgggggaacctccgatgagctactattcccgaaatcttctgtccatagcccgaagcctccttacgcatgaatagattgcaattcgcaatctgccgtggtagaatatcaatgaatagcaataaggaggatattacaatggaaaacaactttgacaacacgtcagataataatgatatgccaaaagacgcatacagcgatccaaatgcaggcactgacgcaggccagtcctatacggacccgaacgcaggccagcaatattacggcaatgcgaatcagaatcagcagtataactaccagcagggcggttataactatcaggataattacaactataatgtgggtaataatacagggtataacaggacctatgacacgggcatggataccagcccgatgtctctgggagactgggtacttaccattcttgccttgtgcataccttgcgcgggcatcgtgctttattttgtatgggcgtttggcaagaaaggcaatgtgaaccgtagaaactattgccgcgcctccttaatcattacaggcgtagtaatggtcatttatatcatattcatggtgatatttggtgttgccgccttcagttcagtgggttactactaaataatcaaatcccctcggttcgtttgaacagaggggatttttaacgtctttactgattgttctgaaaattctttgaatagtggatctgattgtcgttcgtgataaatacggcatctacattatccagctgattgatcagcttcatgcctctatcgtagccgagaagaaaacaggtagtgctcagcgcgtcagccgtcagcgacgagtccgtcaggatggtcacgctgtataggttgttctcgcagggatagccggtattgggatccaggatatggtggtagatcttgccgtccgctttaaagtagcgctggtatatgccggaagtaaccacggatttgtccgagatcttgacggaggttataggctctccggtctcatcaaagggcttctggatgccgatgttataatcggatccgtccagcttgctgcccatggccagcacatttcctcccagattgatcatggcgtgcctgacgccttcctcttccaggtaatctttgatcctgtcggcaatatatcctttggcgatagctcccagatcaatgcccgcatgcgggtcggtgagttttaccgtattatcccggatgatgatgttttcataattcacatggcttaccgcctctgcgatggcttccggagaagggactaaaggagtctcggccttgaagtcccagaggttggataccggggcgatggtgatatcgaaaacgccgtccgacatctcgctgtaatagatgcccttcttaatcagcttgatcgtctccttcgacacttctacgggattcccgccggcagaattgattcgggagatttcgctgtcttcaatcttattggagaacatggaatcatacttcttgcaaagtttctcgcagccttccagcacgtcttcatccacggaatcaaagatctggacgctgatgacggtatcgaacagagtgtccgtataggtctggctcctttctctgggaagccctgagcatccggataagagaagaatggatgccgaaagcaatgcggttaatcttttatatttcataaagcacctcttattctatataatttcagtctctgttattataacatgaaaaacaggatatgcaatcgaacatgtggttgaagcaaaagatttgttgtgttagaatagagcgtatagaaatgaagaaggtaggagagtatgaagattcatttaaagaaaaaagactggattctggtcattatcatcatatgcgtcgcaggactggcattcttggcccatgaatttatcggaggcaagggcgcaagccaggtgacgatcaaggtaaatggcgagatagaagggacttacagcctgtcagaggacagggagattaagattaatgacggcagcaacgtcctccagataaagaacggcaaggccaagatgatcgaggccgactgcccggataaactgtgtatgcatcagaaagcggtatccaagaaccatgagagcatcatctgcctgcccaacaaggtggttgtcgaggtggaaagcagcgagaacagcaagtatgatgccgtgacgaactaaggaggaagcacaggtgagaagcaaagtggcatatttcggcgtgtttacggcgctggcgctgatcttcagttatgtggagactttgatcccttttaactttgggatacccggcgtgaagctggggctggcaaatctgatcatcgtgattgccctttacaagatgagcttaagggaggcttatctgctgtcggtagtcagggtcttgcttgcgggatttatatttggcaattatttcagcatcatctacagtctagttggagggatcctgagcctgacgattatggccttcatgaagaagaaaggcggattcagcattatgggagtcagcatagcgggcggagtcttccataatatcgggcagctggcggtggccatgctggtggtggagacgttcagcgtcatctattatgtcccggtgcttttgatcgcggggatgcttaccgggctcctcattgggatcgtgtcgaacgagatgctgaaaaggcttgtgaatatacaattataggaggagttatgatatcttatcttaaggggacgctggaagcgctggaagaggataaagtagtgatcgatgtagggggaatcggctatggggtgttcatgtcaggacaggctatgggccttcttccatcaattggcaaggaggtaaagatccatacctatctgaatataaaggaagatgccatgcagctgtatggatttctgacgaaggatgacctggaagtcttcaaactgctgatcggagtcaacgggatcggccccaagggaggcctgggcgtgctgtcggcactgagcccggacgaactaagattcgcggttatgtccaacgacgtcaaggcaatctgccaggcaccaggcatagggaagaagacggcagaaaaattgatattggaactcagagacaaactgcgccttgaggatgcattggagcatctggcttccgaaaatgaggtgcaaggcgcggctgcttaccagggagaagtacaaagcaatgccgtccaggctctggcagcgctgggatacggaagcacggaggcccttaaggctgtaaggcaggtggacataacagagaatatggaagtagaagaagtgttaaagcaggcgttgaagctgatgatgttttaatgcggggtgagatagatgagcagacgaattattacaacagaaaacctggaagaggacatcaagatcgagaaccatctgcggccgcagatgctggaagattatatcggccaggagaaggcaaaggagacgcttaagatctatattgaagcggccaaggcaagaggcgaggcgctggaccatgtactgttctacgggccgcctggcctgggaaagacgacgctggccggtattattgcaaatgagatgaacgtgaatatcaagattacttcaggccctgcaatcgagaagccgggagagatggcggcgattctcaataacctgcaggagggagacgtcctgttcgtggacgagatccaccgcttaaaccgtcaagtggaagaagtgctgtatccggcgatggaggactatgccatcgatatcatgatcggcaaaggggccagcgcgcgctccatacggctggatctgcctaagtttaccctggtgggcgcaacgaccagggcagggatgctgacggcgcctcttcgggaccgcttcggcgtcgtcaaccggatggagttctacacggtaggggaattaaagaccatcatcctgcgctcagccagagtgctggaggttggaatagatgagcggggcgcttatgcgctggcaagaaggtccagaggcacgccaaggcttgccaaccgtcttcttaagagggtgcgggactttgcccaggtaaaatatgacggatatatcacagaagaggtggcgaattatgccctggatctcctggatgtggataaggaggggctggatcagacggacaggggcctgcttctgatcatgatcgaaaagtttcagggaggcccggttggacttgatacgctggctgcggcaatcggcgaggatgcggggacgatcgaggatgtgtatgagccctatcttttgaagaacggattcatccagcggacgccgagaggccgcgtggtgacagacagcgcgtaccgtcatcttggaatttcacatgaaaatgaagaaaagtagttggtttttacatcagtttagtttataatagtttacagatattatgaaatttcgaggaggcttctaatggcatcatcaaaaaactatacagaagtattaatagggggaaaggtgttcaccctcagcggcttcgaaagcgaagactacctgcagaaggtatccacttatctgaatcataagattgaagagtgcagcaacagcgaaggatacaggaagcagagcgcggagacaagaagcatcttgcttgcgctgaatatcgccgatgattatttcaaggcaaagaagcagggcggcactttggaaagcgatatagaagcgaaggataaagagatgtatgatctgaagcatgaattgatatctgttcagatcaagctggagaatgcagaaaaggcgatggacaagctgaaggaagagaacaaggatcttcagatgaagattgtccagctggaaacagagataaagaataatcgtaagaaataggctgtctgtggacagccttttttaaaggaaagaatgatatgaacagacacgttgaaatattggcgccagccggctcatatgaaagcctcagggctgcggtgtgcgccggagccgatgcagtctatatcggcggcatgcagtttggggcgagggcctatgccaagaatctgacacaggaagaactggaagaagccattgactatgtgcacatccatggaaggaaagtctatctgacggtcaataccctgttaaaggacaaggagatcgatcggctctatgaatacctgaagccctactatgaaagaggactagacggcgttatcgtccaggatgtaggagcggcatcctatatccgggagcactttcccggccttgcgctccacgcaagcacccagatgaccataaccggcagaagaggagcatcttttatgaagagccggggcatcacacgcgtggttcccgccagggaactgtctctggaagaaatccggatcatgaaagaggagacagagcttgaggtagaatgcttcgtacacggggcgctttgctactgctattcaggccagtgccttttaagcagcatgattggaggcagaagcggcaaccgtggccagtgcgcccagccatgcaggcttccctacagtgtggagggaggcaggccttgcgatcttatgagcctgaaggatctatgtaccattgatctgcttccggaactgatggaggcgggaatcgattcctttaagatagaagggcggatgaagcagccggattatgtgtatacggtaacaagattataccggaaatatgcagacctgtactgccagaaaggaagagcaggataccaggtatcaagagaggatagggaaaaactgcttggcgcgtaccagagaaggggatacagcgaaggatactaccgccagcacaatggaaaggaaatgatatctttcagacgcccgccgggtcgggaagaagagacagcagcatatccagattataaaatacaagaaaaaattaatgggaaattaatactttctttgggtcagagtgctagactattactggaatatgggacataccgcatagaatgcgaaggccctaagccagagcctgccatgcgtcagccgcttcaagcgtccagggtggagcagcagatgagaaagaccgggaatacgcagtttgcgtttgagcggatggaagtgtgcatggagggggatctgttcctgcctatgcaggcactcaacgagctgcgaagagacgggcttgcggccttgacagaccgcgtgctgtcggattaccgtagaaaggcagagaggacgcaagaagcaaaggaagaggcagcgtcgtctagagaaaaaaggatggcttgcggggacgccaggccaggaaaggcatcaaaagacccgcagcttgctcttttagtccgctccctgagccagctgaaggcggcagtggaatgcaaggaagcagaatgtatttatatagatctgccgccgcaggagataaaagaggcagccagaatgatccagtccgttcaatccgggaaaaagcattatcttgccatgccttatatatttcgggaagatgcggctcttaggcttgaaaaggcttacgggatgatccggttatcctttgacggcatactggtacggaactgggagagtctccaatggcttttggagcatgcatataataaggagatacgtggagattataatctttatgcctgcaatcgcttttccaagcggttcatgcaggagggcgggatcaaacggttcactgcgccggtagagttaaacgccagagaactgaaagaactggatattcggggacagtcgttgatcgcctatggttatcagcctgtcatggttacagctggctgcattggaaagaccatggatagatgcgatgcaaaagaaggctggctgcatatccgggatcgatataaaaagaagtttgcggttaaaaaatgctgcgcatactgttataatataatttataattcctcgccgctttatctggcggataaggcgcaagaactcctgagccttgagccggcggaaatccgtcttgatttttctacggaaggcacggagcagatgcgcaggatcattctggactatgtcaggggaatcatctggcgggaagaggtgcaggcgccggatatggagtatacccggggacatttcaaaaggggagtaaagtaggtgaagaagtggttaatataattgttgaactatccaaatatctgatcatcatattaatgacgatgtatacgtacctttgcttcagcatctttggctactatgatccggataagaagaagcggatgcttaggaggcagaatgtactgatgttcacgatacatatcatcgcatttctggtgatgtatctggagaagcaggatgtcaagctgcttgccttctatttgatgcaagtggtactttttggtactactatcttgctatatacgtttatttatccaaaggtatccaggctggtcgtaaataatatgtgcatgcttctttgcattggcatgatcatgctgaccaggctgaactatgaaaaggcggtcaagcagtatgtcatcgcggcgggagccatcgcggcgagcttcgtgattccggttatcatccgcaagtttaagaaactgtcggaatggaggaacttgtatgccattgcaggcatcgtatcccttgcgatcgtggctgtggtaggccaggtgtcctatggcgcgaaactaggttttacggtaggcggcatcagcatccagccttcagaattggtgaagatcatcttcgtattttttgtggcggcaagtttcaagcggtcgctggaattccgggatattgtgatcacgacggctttggcggcattccatgtgctgattctggtagcatccaaggaccttggggcagcgctgatcatctttgtcgtatatctggcaatgctctatgtggctacccgccagccgctgtatctggcggccgggcttggcgcgggaagcgtggcgtcagtggcggcctattatctttttggacatgtacggacgcgtgtcatcgtgtggaaagatccctttgcgtcctatgacaatggcggatatcaggttgcccaatccttatttgctatcggcacaggcggctggtttggaatgggactctttcagggcgagccggataccatccccgtagcggatgaagactttattttttcagccatatcggaagaactgggattgatattcgcgctgtgcatgatactggtctgcgtcagctgctatgtcatgttcctgaatattgccatgcagcttcacaacatgttttataaaatggtggcgttgggacttggaacctgctacatattccaggtattccttaccataggcggcgtgaccaagttcatcccttctacgggagtaacacttccgctggtcagctacggaggaagttccctgcttagtacgctgataatgtttgcgattattcaaggactgtatatattaagggaagacgaggaagaagatattgaaagaaagaaaaaggaaaggctacgagcaaagagaagcggacaagagaataaaaagagaccaagaaagacgggagatgtcccggaaagagcgcaaagaagccaaccgaaaggacaagcaaaaggccaaggcaaagcgcgcaaggaacaaagaattcgctagggtaacctacatcttcgtcgccttattcctggtacttatgggctatatcacctatttccaggtggcaagaagccgggatatcatccgaagcccttataatgcaagacaggattcttatgctgaccgggtagtaagggggaagatcctagataaggacggcaacgtgctggctcagacgaacgtatcagaagacggcacggagacgagggagtatccttacggaaacatgtttgcccatgtagtaggatacagcgtgcagggcaaatcaggcctggaatctgtggagaactttgaacttctgacttccaatgcgtttttcctggaaaagataaagaatgaattccaggataagaagaatatgggcgatagcgtggtgaccactttgaatctggaacttcaggaggctgcctatgatgccctcggcaattacaagggagccgtggtggtgatggagccgagcacaggaaagatcctggccatggtctccaagccggactttgatcccaataccgtagctgagaattgggatttcctgaatactgatcaggacagcgtgcttttgaatcgtgctacacagggccagtatgcgccgggatctacattcaaagtggttacggcccttgagtatatgagagagaatccggattatgaaaattatggctacaactgtaccggggccatcgagaaggatggggtgaccatccgctgctacaacggacatgtacacggccaggtaggcttccaggacagtctggcttactcctgcaatacctctttttccaacatcggtctgtcattagacattaagaattttagagagacatccaaagaactgctgtttaattccaaacttccttccgtgctgccttacagtaagagttccttctcgctggagccgggggctggaagcgctgataagatgatgaccgccatggggcagggaaaaacccaggtcagcccgtaccatatggctctcatcacttctgctatcgccaacggaggaaccctgatgaagccgtatctggtagattccgtcaccaattataccggtgcggtcatcgacaagaataagccggaaaagtataaaagcctgatgacttctgaggacgcggccaagcttaagcagtacatgtcagccgtagtggactatgggaccgcatccgtcttgagcgggcagagttatacggccgccggaaagacgggaaccgcagaatacagttcggataaggaaaaggatcactcctggtttatcggaatgaccaacgtggacaacccggaactagtcatcagcgtgatcattgagtcatccgacgggaccgccaaagcagtcgatgtggcgaaacaggtatttgatgcctattactattagaaaagagggaaatgcgaatgaggtactataagcatctctacctgatggaagggctggagaagaagaaagaccgaatcatccggaaactggaagaaaataagttccaggtaaatatccatatcattacgctgtcccagaacgagaagaaccatttggagatctataattccgtgctgcttttgcagccggattatccccatgaggacttctttgtggtggggatcgcaaaaggatatgaagatgcggtagaattggtagaacaaattgtccaggaagtgtataatgagacaaaaggagctgacatccgctcttatatattaaaaaaagaacaggaagagtaagatgctacatattctattgctaatcttgaaaatcatagggatcataatagcagcaatactggggatactggtattgttagtttgcgttattcttttagtgccaatccggtacgaggcaggggcggagtttgacggcacacttaagggagtaaaggccagggtgaaagtgacatggcttgcgcgcctttttaaggcaatagccgggtatgaaggccaggaactgtcatggagcgtccggatagcgtggaagacgatgaagagtggacaggatgataagaagacagtagaaaaagaggtgggaggatatgaagaagaactggaaaaagagtgggaagtgctggaagaagaggtggaagagcctccgaaggagcgtaaaggccatccgaaggaagatgaggaagaacccggattacctgaaagaactgaaacgcagtttcaaaaaactgaagaagatatggaaaaggcagaagccgtcgctgtcccggaagatagggaacgcgacagcaaagatacgaaaggcaaaaagggcataggacggaaggcaaaaggcctgtgggaaaaggcaaaggctctgtatcggaagataaaatgtacattccttgcgttctgtgatagaataaaattattgctggagaaaaaggaaagactggcagagtttattactgacgaagtccacaagaaggcattctttaaggctaaggacgaggcattcaagctgcttcgccgcctgaagcctaagaagcttgcggcagatctccattatggatttgaggatccctgcacgaccgggcaggtactggcggggcttagcatgctgtatccattctggggcgagcatgtaagcattatcccggattttgagcacaaggtcctggagggcagcctgtacatcaagggcaggatccgcatcatccattttgtcaggcttatgtggaacctggcatggtgcaaagaagtgcgtatgacataccgtcatgtgaaagaatttgaattataagcgggtaggaggagcaaaaatatggcagagaataacaattttaaaggaacggtggaagccctgtttcatgggatggacggagttgtctcatccaagacggtggtaggagatgcaatccatataggagatacgatcattctccctctggtggacgtctcattcgcagtaggggctggcgcgtttaacggagacaaaaaggaaaaaggagccggaggtatcggaggcaagatgacgccaagcgccgtgcttgtaattcagaatgggcataccaggcttgtgaacatcaagaatcaggatacgatgaccaagatccttgatatgataccggatgtggtagaaaagttcagttcttcaaaggaaggcaagatgacggaagatgacgtaaaaaatatccttgatgaggctgattcttccaaagaatagtcatgtatttccccctatgcacatataatattacaaaacaagggcaggggtggcaataattatgaagcgggtagtcggattcgccctgttctgggtggcggttggcatcattctggcgatgatactgccaaacatgttcgtggaagtgctgtgcatcgctttatgcatactggctggatataacttgttttgctgctagtataagaaaatgagaaatagtacttgcaatttgattgctcttctggtaaaataactattgttgcgagttcggaaaagaacttattatgatcgttaggaggtgcagtcatggctaaatgtgctatttgcgaaaagggtgctcactttggaaacaacgtaagccactctcatagaaaatcaccaaagatgtggaaatcaaatgtaaaatcagttcgcgtgaaaacagagggcggagccacaaagaagatgtatgtttgtacttcttgtttaaaatcaggcagagttgagcgtgcgtaaggaaaattaaaactcagatttcgctatggaatctgggttttttgttgtcctcacaagggcttttttgttgtaatatagaggaaaacagagtataatactcttattattatgtattaatattgtggaaataaggatacaagaattggaggtttttagatatgaagggatgtatgagtacagatcttggcattattacgattgatcctgaagtgattgcaaaatatgcaggaaccgtagccgttgaatgctttggcatcgtaggcatggctgcagtgaatatgaaggatggatttgtccatctgttaaagagagaaagcctgacaagaggaatccaggtaggaatatccgacgataatcatattagtattaacttccatattattgttgcatatggcgtaagcatctcggcagttactgagaatctgattagtaacgtaaaatataaggtagaagaattttccggtatgccggtagataagatcaatatctacattgaaggcgtcagagtcatcgattagttaaggaggagcattaaaagtggctacaaaaactataaatgtggatatgcttgctaagatgtttctggcaggcgcgcagaatatcgaagcacagaaggaatttatcaatgaattaaatgtattccccgtaccagacggggatacgggaaccaatatgtctctgacgatcatatcagcggcgaaggaagtgatggcgcttgagaagccggacatgaaggatttggcgaaggccatatcatcaggctccctgcgcggggcacgagggaattcgggcgtaatcctatcccagctgctcagaggattcaccaagtcgatccgtgaagagaaagagatagacgtgctgtcattagcagctgcctgcgccagggcaagagatacggcttataaggcagtcatgaagccaaaggagggaaccatccttaccgttgccagcggaattgctgaaaaagcggcggagatggcaggggagacggaagacttggaagagttcatccctgcagtcatcgagcatgctaaggcggtgcttgagaagactccggatatgcttccggtactgaaggaagcgggggtagtggattccggcggccagggacttcttgaagtaattaaaggcgcatacgatgccttccagggcaaggagattgactacagcgccattgcgccaaagaatgcgacagcatctgcgggagcagtgaagatcaattcacaggagccggtagatatcaagtttggctactgtacagaattcattattctgacagagaaggaatttacggaagacaatgagcaggagttcaaggcatacttaagctccatcggtgattccatcgtctgcgtagcggatgatgacgtggtaaaggtgcatgtgcacaccaatgatccggggcttgcgatccagaaggccctgacattcggccagctgtcccgcatgaagatagacaatatgcgggaagagcatcaggaaaaattgattaaggacgcagaaaaactggcagcgcaggacgcggcaaaggaaacgccgaagaagcctgatgagccgagaaaagcgatgggattcatcacggtctccatcggagaagggttgaatgagatattcaaggaattaggcgcagactatattatcgagggcgggcagactatgaatccgagtaccgaggatatgctcaatgccattgatcaggtgaatgccgacagtattttcatcctgcctaacaacaagaatatcgtacttgctgcgaatcaggcaaaggcgctcgtgaaggacaaggagattatcgtcattccaaccaagacggttcctcagggaattactgcgattattaattttgttccggatgcggatgcaaagacgaatgaagagacgatgctggaagagatcaagaatgtcaaatccgggcaggtgacttatgctgtcagggatacgaagattgacgacaaggagatccatgagggagatatcatgggcatcggcgacagcggcattctggcagtgggcaagggaatcgaagagacgacgaaggagatgctgtcccagctggtagacgaggattcagaactcatcagcctttactacggagaagaagtaagggaagaggacgcgcagagatttaccgaagaagtggagagcctgtatcctgacgtagacgtggatgcccattttggaggccagccgatctactattatgtgctggcggttgaataaacgaattattttcaggcagaatataagatagggccagacctcttaaggccatagggtattgtccctttggagcggggggctggcttctttttatgatggagcggatatgatagaaaacacaagcataaaagaattaaaaggaataggcgaaaagacccagaaactatttgaaaaggtaggagtctctacggtgggagacttaatcaggtattatcccagaggctatgatgtctatgaagatcctgtaccgatcagcgaagtggaggaaggaaaggtccagacggtggccggggctatcttcggaagagtccaggtatcgggaaaccgtaatatgcaggtgacgaccatccatgtcaaagatctgaccggtaccatcaaggcagtctggtttcggatgccttttctgcggaacacgctcgcggggggcggaaagatcatacttagaggcagggttacaagccgcaagggcggccttgcgatggagcacccggaaatcttctatccggccgggaagtatgaggagaagattcacacgctgcagccggtctatgggctgactgcaggcctgtccaacaatgtggtggccaaggctatgcatcaggcgctgtcccagctggacctgacccgtgaaacgcttccggacgagcttcgtctcaagtatgggcttgctgaatataactatgccatccggggcattcatttcccggaggacaaggaagtgttctatcatgccagggagcggcttgtattcgaggaattcttagagttcatcctgtctatccgaaagatgaaggataaaaatgaaaggatagagaatgaatacattgtccaaaggaagccggaagtggatgaattgattggaaggctgccatatgagcttacgaaagcccagaagaaagtatgggatgagattgcccatgacatggcatcagataccgccatgtcaaggctggtacaaggagatgtaggatccgggaagacgatcgtggcggtactggctcttatcagcgttgcgctaaatggatatcagggagccatgatggcgccgacggaagtcctggcacggcagcactatgattcgattacccggctgctggaagaatacgggataaagattaaagtagaacttctcaccggatccatgacggcaaaagaaaagagacgagcctatgatcggatcgaatgcggatatgccaggatcatcataggaacccacgcgctgatccaggatcgggtctattatgattgcctggcgctggtagtcacggatgagcagcatcggttcggagtcaagcaaagggaggcgtttgcaaggaaaggcggaatgccccatgtgctggtcatgagcgcgacgccaatccccagaacgctggcgatcatcctatatggcgacttggatatctccgtgattgacgaacttccggcaaaccgtctgccgatcaagaactgcgtggtggacaccggttaccggaagacggcctatgcgtttatgaaaaagcaggtaggagaaggcaggcaatgctatgtgatctgtccgatggtggaagaaagcgagcagctggaagtggagaatgtattggactatgcggccatgctgcaggaagagatgggaaaaggcatcgtagtttcctgtctccatgggaggatgcggcaggccgagaaggatgatatcatggagcggttcggacgctgcgagatacagatactggtatctaccacggtgatcgaggtaggaatcgatgtgcccaatgccacggtcatgatgatcgagaatgccgagcggttcggactggcccagcttcatcagctaagaggccgggtgggaagaggaaagcatcagtcctactgtatcttcatgagcggctccaaggcaaaagaaaccagagaacggctgaatatcctgaatgaatccaacgacggtttcaagattgccagcgaagacttgaggctgcgcggcccgggagatctctttggaatccgccaaagcggcatgatggactttaagctgggcgacgtattccaggatgcgaaggtgctccaaatggcaaatgaggccgcggatctgcttttaaatgatgaaaacggctggttgaaaaatcttccaaaacatgaaggaacttctagtgtaataatctgattcctccatatactatggttgtaacaataaagcaaaaagttacaaagttacaagaaggaggagtatgacaatggcaagtcgttcatcaaacagagcagccgtacctgaagcaaagggtgcattggacaaattcaaatatgaggttgcaaacgaattaggagtaccgttaacagacggatacaacggagacctgacatctagacagaatggttctgtcggcggatatatggttaagaaaatgatcgaacagcaagagaaacagatggctggcaaataagcaggatcatattttagcaacaactgattagaaaaagcaccaggcaggatgaaataagacctgtcgggtgcttttttctatatgcagacttcaatatctggatggaagccaggttggcgaaccctttttgccgatttatggaattacttcttcgactattggcatatttttggaggctgcccattacaatggtaataatagattgatacctacgaggagttgtcgcatgaaacagattctggcagcaattttaagcgccttgctctgtgtacagcccgtatttgcaatgccggtcaaggaaccagtcctgtatacggatgcacagggggaagcagaagataacgatgaaacgcaaaagaactccaatacgcaggaacccgccgaagggcaggaggccgccgataccaaagactctgccggggggcaggccgccggcagcacagggaatgaggctggcccccaggtcggcgctccatccgcaatcctgatggaagcgtccaccggtcagatcatatatgaaaaggatgcagatgagcagagacctccggccagcgtgaccaagatcatgacgctgcttctgatctttgacgctctggattccggtaagatcagcctgaaagatgaagtctccacatccgaatatgccgcctccatgggaggctcccaggtgttcctggaaccgggtgagacgcagacggtagatacgatgatcaaatgcatcgccgttgccagcgcaaatgatgcctgcgtggcaatggccgagtacatctgcggcaatgaagaagaatttgtaaagcagatgaatcagagggcgaaaggcctgggaatggaaaatacgcatttcgtaaactgcaatgggctggatacggatggacatctgaccactgcccgcgacatagcgctgatgtcaagagaattgatcactacatatccgcagattcacgactactctatgatatggatggagaatatcacgcatacgacgaaaaaaggaaccacagagttcggcctgactaacacgaacaagctggtaaggcagtatgaatatgctaccggcctgaaaacaggttccacggataaggccaaatactgcgtgtcagcaaccgccaagaaagacgggatggaattgatcgcagtaattatggcggctccggatcacaagcagcggtttacggacgctaccacgctgctcaattacgggtttgggaaatgcaataagtatgaggaagagaaggcaaaatccattcagcctgcaaaagtatcacggggggtagcggagacggtaaaggtacggcagaagacgccctttgcctatgtagacattactggagcggaccttaagaccattgagcgtaaagtggccttgaacaagaagatcaaggcacccgtgaagataggcgacaaggtgggaaaagcaaaatatttcttaagtggaaaagagatcggcagcatagacatcgtggctgctgaatcggtggatgagatcagttataaaagcgcgatgggcgacaccgtcaaaaaattcctgctgtagaagatagggggctatccccctatctttgctgtccatatagaagattgcaaattccaaagattaattatataatgattaaggcggacatgccgtaaggatggtggccgcttcgggagttaaaggagaagataggttgaatattctaatcattgctattgtaatcatcatcttgggaatgatcgttgagaatatccgggaactgcatggattcagaacaacggtatataaaattgcatcccctaagttaatggggctacaggaagagaagcggatcgtattcttgagcgatctgcataactacagttatggagaggagaatgggaggctgtttcaggcaattatcagcgcccggccggatctgatcctgattggcggggacatgctggtaagaaaggacggaaattcctatgaagacacgcttcgctttctttgccgccttccgtccatctgcaaggtatactatgccaatggaaaccatgagcagaagttaaaagaaaggccagaagcatatagccagtcctataaggactatcagagccggctttgcagcgcggggatcgtatttcttgaaaatgagtccgtaaggattccatgggatggcgccggcatctgcattaccggacttgagatcggacttgacggctacagaaagtttggaaggcggccgatggaagaagaagagatcgagtccagggtaggggcggcggattcctcctaccagatactgctggcccataatcctgcctatgtggaggcatacaggaaatggggagcagatctgatactttccggacatctccatggcggaatcgtaaggattccgggaatcggcggcgtgattgctccggacctcaccttgtttcccaaatattcgggagacatatacagggaagaggatgctacggttgtcgtaagcaagggcttaggcgcccactccgtccccatccgtctgttaaatccggcggaaatggtagttcttgtgctgaatgaggattaaaacttgtgaaaagaaggaaaatcctgtataataatacaattgtgacgataaaagatagggtgtgagggatatctatgggaattccggtaaaactgcaggtcttcgaaggaccgctggacctgcttctacatttgatagataaaaataagatcgatatctatgatattccgattgtggagatcacgagccagtatatggactacatcaaggccatggacaaggaagatttgaacatcatgagcgagtttcttgtgatggctgcgacacttctggatattaaatgcagaatgcttcttccgaaggaagtcaatgaggagggagaagaagaggatcccaggcaggaactggtggagcagctgctggagtacaagatgtacaagtatatgtcctatgaactgcgggacaggcaggtagagggcgagcaggtgatgtataaggcgcctacgattccacaggaagtgctgggctatgtagagccggtagatctggatgccctgctgggggatctgaccctttccaaactgaaccgcatctttaaggatgtgatgaagaagcaggtggataagatcgaccctgtccgcagcaaatttggcaagattgaaaaggaagaagtcacattaccggataagcttgattatgtcacggaatatgcgaaaagccatggcagattcagtttccgggaactgctgaagaagcagagttccaaaacgcagatcgtggtaacgttccttgccattttgcagttaatgaaggaaggcgtgatcatgatccggcaggaacagccatttgatgatattatgattctgccgaaacgtgaatcttaagtgtgggaaaggtagtatggaagaagtggaaatcaacaaattagaaggcgtgatagaggcgattcttttcaccatgggcgagtcggtggaactgaataagattgcggccgctatcgagcatgacgaagagacgaccagaaagatcatacatagaatgatggacaagtatgaggcagaagacaggggcgtcaggattatcgaacttgaagatgcgtttcagatgtgtacgaagacgcagatgtacgagtatctgatccgggtggcgaagcagcccaagaagtacgtgctgacagacgtcctgctggagacgctgtccattatcgcctataagcagccagttacgaaactggagatcgagaagatccggggcgtgaaatcagaccatgccgttaacaagctggtggagtataacctggtgtgcgagaaaggcaggatggaggctcctggcaagccgatcttgtttggcacgacggaagagttccttcgaaggttcagcatccagtcggtagaggatctgccaagcctgaatcctgagcagatggaaagttttaaggaagaggcggaagaagagatccagttaaaattggatatctgatacttctttaagaatagtcttaacccggcctacatatattgcaataacatggtgatgtatggtgtggcagatgagaaagaaccgattattaggaattctccttgcttgtattttgttgatccagccttttagcgcccaggcgaaagagtcggatgccgcggacgagccggataatctgtacgcccagtcagcagtattgatggatgctgacagtgggcgtgttttatttggaaagaatgaaaacgaggcaaagcctatggccagcacgacaaagataatgacgtgcataatggccctggagaatatggaagagggacagatcgtggcggcctccgattatgcggccagccagcccaaagtcaggctgggggtcaggggaaaagaagagtactatctgaaggatattctgtattccctgatgctggaatcccacaacgacagcgcagtagtggttgcggaaggaatcgcaggctccgtggaggcatttgcaggactgatgaaccagaaggcggaggaaatcggatgcaaggatacatattttgtgacgcccaacgggcttgacgcttacgatgatggaggaacccactctacaacggccagggatctggcctctattatgcgctactgcatcatggaatctccaaaaaaggatgaattccttgagatcacaggcactaagaattatcattttaccaatgtggcaggagaccgtgaattctcctgcaataaccacaatgctttcctggatatgatggatggcgcgctgacgggaaagacaggatttaccggcgatgcgggatactgctatgtaggcgcgctgaggaaggacggcaagacgtttatcgtggcgctgctggcctgcggatggcccaataataaggactataagtggaaggataccaaggccttgatggaatatgggcttgccaattatgagtaccggaatgtatgggaggaacccgccctttcccagattagagttcaggaaggagtatcggccgggaatccttataagagggaatccaaggtgcaggccgtagtcaaggggggagaaaaagaagttaatgcccttctgaaggcagatgaaaaggcagaggtcaaaaggaaggtaaaagaccacctcaaagccccgctaaagaaggggcagaaggtaggggagattcaatatcttctggaaggaaaggagattgcatcctttgatgtggtgacggatagaaaagtagaaaagagaagcgtgttgtggtgcctgaatcaggcgcttcaaagagtatgcctgtagaaaagcagccgcaaggctgcttttcttcttctgtaatcttatagtggtagcatgatttataaggaagataagaacatgtctatagaaaaagtaagagcgtatttccggcagtatggcatagaagacagggtgcgcgaggttgaggaatccaacgctgccgtatgatcgaactgaatatcaaagaactggaagattacagccattgcaaggagtgcagagtcttaagaaagattaacgaagaagacaaaatatactgggagaaggaaagagaaaaatactatcagagaagcgggcagccgtaatttcgtaatttgcggctgcctgttgacggataggggagaggtatgatattttaatagtgatttcggatgatattcgtgttttctgccccgtgcaattctgtatgggcgtttccaaggttttaaggaattttatattgacattttgaagcaattataatagtatattaatcatagaacgaacgttcgttcgataagcgagaaggagaatatgttatggcaagtgatgataagaagcgggcattggatgcagcgatagcaaagttggagaaggattttggaaaaggcacggttatgaaactgggcgatccggcggctcaagtggcagtggagacgattcccacaggttccttaagccttgatctggcgctggggcttggcggcgttccgaaggggcgcgtggtcgaggtatatggcccggaatccagtggtaagacgacggttgcattacatatgattgcagaggtccagaagcgcggaggaatcgcaggattcattgacgcagagcatgccctggatccggcctatgccaagaatatcggcgttgatatagatgaactatatatttcgcagcctgacagcggggatcaggcgcttgagattgctgagaccatggtaagatccggcgctatggatatcatagtggtagactcggttgctgccctggttccaaggcaggagatcgagggagatatgggggacagccacgtaggactccaggcaaggctgatgtcccaggcactccgcaaactgactccggttatcagcaagtctaactgcgtcgttatcttcattaaccagttaagagagaaagtaggggttatgtttggcaatcctgagacaaccacgggaggccgggcgctgaagttctatgcttccatccgtatggatgtcagaaggatagagactctgaagcagagcggcgagatggtggggaacaggacccgtgtcaagatcgtgaagaataagatcgcgcctccgtttaaggaagcagaatttgatatcatgttcggaaaaggcatatccaaggagggtgacatcctggatctggcagtaagcattgacctggtcaacaaaagcggagcctggtttgcatataatggcaataagatcggccagggccgggagaacgccaagtcatatctggctgagcatccggaagtgatggaagaactggagaagaagattcgggaacactatgaccttgaccgggatccggcatctgctgcaggagaagagaagttggaagagaagaaggcaacaggcagaaaggcgaaagaggaagcataaggatgacggtgacgaagatagagccggtgacgaagtcaaaatataagatatatctggacggacagttcgcctttgtattatacaaaggcgaactgtcccgctatcagatagaggaagacggccttcttgaggaagcgcagtatcaaaggatacgtaatgatatcgtgcttaagcgggccaaactacgggccatgcatctgctgaccgatatggggcgtactgaatcccagttaaggagcaagcttgcgcttggcggatatccggaagacattgtaggagaggccgtggagtatgtaaaatcctttgggtatatcgatgatatggaatatgcgagaagttttatcgagagccggaaggataagaagagccggaaagaactgtatgcagccttgagccagaagggcgtggagaaggaattgatcgagcaggcctttgaggaatgttatggaaatgaggattcccgggcggcaattgaggcaattttacagaagaaaaagtatgatccgcatacggcagaccatgcgcaaacccagaaaatactgggatatctggtacgcaaaggcttccattacgaagacatccgtcaagtgatacaagtttctgagtggaatgcttgacatctttgtgaaaacagtataaaatttaagtgttgtatttgtacaatgaaaattaaataaggaggtgctcctgtgccgataggaatagcgattgctgtaatcattgtatctatcatagctgcagcggtgatcagccactttgtgacggtttctaatctgaagaagaatgcagaatctaagattggaaatgcagatagcaaagccagagagattattgatgatgcggtaaagacagctgaggccaagaaaaaggagtctctcttggaaattaaggaagagtctatcaagaacaagaatgaacttgagaaagagactaaggaacgtagggcagaattgcagagatacgagaaacgcgttctttccaaagaagaggctttagaaaaaaaggcagatgcaattgagaagcgtgaagcagggtttacagcgaaagaagaacagcttaggcagcgcgaggcgaaagttgaagagctgagtaagcagagagtacaggaactagaaagaatctcaggacttacctccgaacaagcaaaagaatatttgttaaaaactgttgaagaagatgtaaagcatgatactgcgaagatgattaaagaaatggaagcgcaggcgaaggaagatgcagacaagaaggcaaaagaatatgttgtcactgcaatccagagatgcgcggcagatcatgttgcggagactacaatttcggttgtacagcttccaagtgatgaaatgaaaggaaggattattggacgggaagggcggaatatccgcactctggagacgatgacaggcgtagagctgattatcgatgatactccggaagccgttgtattatcaggctttgatccaataagacgagaagtcgcgagaattgcgctggaaaaattgattgttgacgggcgtatccatccggcaagaatcgaggagatggttgagaaggcgcagaaagaagtagacgccatgattcgtgaagaaggcgaggcggcggctcttgaagtaggagttcacggaatccatccggaacttatcaaacttctcggacgtatgaagttcagaaccagttacgggcagaatgcattgaagcattctatagaagtggctcagttggcgggacttctggcaggcgagattggcctggacgtcagaatagccaaacgtgccggtcttttgcacgacataggcaaatctatagatcatgatgtagaaggatcacatattcagattggcgtggatctctgtagaaagtataaggaatccgcgacggtcattaatgcggttgaagctcatcacggcgatgtagaaccggagactctgattgcgtgcgttgtacaggcggcggatacgatatccgcggcaaggccgggagcaagaagagaaacattagaaacatatacaaacaggttaaaacaattagaagatatcaccaaccaattcaagggtgttgataaatcttttgcgattcaagcaggtagagagattcgtgttatggtagttccagaacaagtatctgacgcagacatggtattgatggccagggatattgcgaagcaaatcgagtatgagttggaatatccggggcagatcaaagtcaatgtaatacgtgagtcacgagttactgactatgccaagtagaagataaatgtgtggcagggccggcagtatagccggctctgtttttttgttctacccggcattgaatcaagactgttatcggctgatttgaccgcaatgcaggaaatgaaattgaaacttgcaaaaacggacataacattaacgaaaaacgaggaagcaaaagaggaatgagaatttgagaaaaataaaacttgcaaaaatgaccgttctatattatactatgtaatcagaatgcaaattcaagaatatgaaagataggatggatgaaactatggcgttgacattatcaagaaaagcggctcaggtaaagccgtcttcaacattagcaattactgcgaaggcaaaggaactaaaagcagaaggaattgatgtagtagggtttggggcaggagagccagattttaatacgccggaaaatattaatgaggctgcgattgccgcgatcaagtccggatttacaaaatatacgccggcatcaggaatcgcggaacttaagaaagcagtcagcaggaagttcgaagagtttaacggactgcattatggaacggatcagatcgtaatcagcaacggcggaaaacattctttgacgaatatattccaggctattatgaaccctggagacgaagtgattataccggcgccttattggctgacttatccggagatcgtaaaactctgcgatggtgttccggtatatgtctatggtaccaaagactttgggtacaaggtaactgcaaggcagatcgagaatgtggtcacggacaagacgaaggcggtgatcctcaatacgccaaataaccctaccggaatggtgtattctgagggagaactaagagccattgcggacgttgcagtcaaaaaggacatctatgtggttgcggatgaaatgtatgagaacctgatctatggggataagaagcatgtaagcattgcatcccttggagaagagatctataagagaacgattacctgcagcggcttgtcaaagagctactctatgactggatggagaatcggatatacaggctccagcgtagagattgcgaaactgatgggaagcatccagagccatcaaacttccaaccccaactccatcgcccagaaggctgccctggaagcgcttcggggacctcaggatgcagtgacggccatgagggaagaatttgaacagagaagaaaatacatgtatgagcgtgtcagccagatgccgcttgtagatgcgcttgagccggagggtgctttctataccttcgtagattttactgatgtactggaaaaatcctataaaggcgtgcgcataggaactgcaagccgcgttgcggagatcttgattgaggactacaaagttgcggttgttccctgccaggattttggatttgacaatttcgtaaggctgtcttatgctatttctatggaaaacattaagaaaggcctggatcgcatcgaggaattcgtatcttctttgtaaaaggctataggaaagagcagggatctaagaacaatgagtgaagaagtcagacgcgtaggcagagagttagtgtataaaggagcaatccttgaagtctataaagaccatatggaatttgccaatggcaaccacgcggattgggattatatccaccatgacggggcggccgcggtcgtccccgtgcttcctgatggcaggatactgatggtgtcccagtacaggaatgcgttggagcggcataccctggaaataccggccggaaaactggacaggccggatgagccaggaaaactgtgtgcaggaagggaactggaagaagagaccggctaccggtcagacagtttggaatggctgattacccttcgcaccaccgttgctttctgcgacgagaagattgagatctatgtggcaaggaacctggcagctgccagccagcaactggacgaggatgaatacgtggacgtaaaggcctataccatagaggaacttaaggagatgatatttggcggaacgattgaggattccaagactattgcggcaatccttgcctatgagtccaaatatttaaaacagaaataagaatatatcagaatgcccggcatataatgaagtatcttggcaaagggggaacatttgtgaggatacgtgagaacaagaagcatttcatcttgttttatatgctgggcttttttattggaatcgtctatgcgaatctgatgtccaaagactatattacaagcatggggatcttcaatgaattttttttaagccagtatatgcaggcagatgtggatgttgcggaatatatctggtatgtggtacggataagggtagctccggtagccgtaatctgcgcgctgggatgtaccaggctgaggaaacttgtggttgtgctgtttctgttatggacaggcttttccagcgggatgatcatgacctcgtcggtgcttaagatgggagtaaagggaatcatcctgtgcctgatcgcgctgactccacattttattttctacatagcggggtatatgatccttctgtggtatttcttctcttatccggaatccagatggaatctgtccaagacggtcagtttcctgctctttattgccgtagggattctgctggagtgctatgtgaatccggtaattatgcagatgttcttgaagacgttatgagggagtgattggcgaaggccaattcactccctttcccttttcagataataattgagatagatcaggcagaataggaagatgcacagctggcttgcaagcatgccccagagatatccctggatcccaaagacggggatgaagagcagaacgctggcgatacggacactgaggctggctgaattgatcacaaaggacagggtggtcttgccaatcccgttcacgatgctgatcagggtattgttggtgtataagaacggacacatccaggacagagtgacgatgtaccctccggccatggaactgtggaacagcacggttccaatccaattgccgaacgtaagcagcagcacgcagcagatgctccccagaaaaatgcaggagtaagtgacctttttcaccaacgcggacagctccttatggttctccatggcctgtatctcagccaccgcgggaagcagcatggtggatacggaattggtgatcgcggaagggaagagtatgcaggggagggccattccggtcagaaccccgtagatgctcagcgcctcggcaaccgacattccataggtctggagcttcagggggatggagattgcctctatgctttgaaggagatttaatagtacccggcttgcggtcagcgggatggacagcgctatcagctcgcgcccatgcttcatgcaggaggagaggcgtattctgggccatttcccaaagcctcctttgccaaggatggagcgcaggcagaacagggaggaaagaatttctccggcgatcagacccgcgacggcgatggatacgccgaagcggacgccatgcctcaaaccatatatgtagatcagatacacgcttaagattcttgctatctgctcgatcatctgggaggttgcggggatgccggtctgctttagcccgaaataatatccgcagatgcagctgtggatggaggcaaatggaaatgcataggaaaggatcaccagcagctgggcgcatctcgcgtcttttaagaaggtatcggcaataaacaccgaatatttctgaagaattaccgtcacaatacaggagacggcaaccgtcagaaccaggctggtgcacaacagttcccgggcttccttctttttgccctgggtcatgcatcttgccacgcagcgggacagtgccagctggattcctgcagaggtaagggagaagcagagggcatagattggaaagacaagctggtacaggcccacgccttcctccccaaaggtatggcttagaaaaatacggtaaaaaaatcccatgaacctggtggcgaaaccggtaatggtcaatatgaaagtgcctttgattatggcgcgttttcgagacatggcagactccttaaagatattgttataacatattcaaaatagatacttgacagaaccaaaaagcagtgctattctacaggaagagaaatcctagcaaattgctaggaattaaaaagaaggtgagcataatgaaactttcgaccaaaggaagatatgggctgcgcgcgatcatagatttggctagatatagcgaggaagagcctgtgtccatcaataatatttccataaggcaggatatttccgaacggtatctggaacagctggtggccttgcttaagaaggcagggctggtcaagagcatccgcggggcaactggaggatacgtgcttgcgaaaagggcggaggagatctcggtaggcgatgtgctaagggccctggaagggagcctggagccggtgaaatgcgccgctttttattcagatgaaggctgcatggcctcagatggctgcgtgaccaaatatgtatggcagaaaataaatgacagcatcaacaagacggtggatgagatcatgctggacgagttggtacgggaaagcaagatgattaatccggagggcgactgtgagaatcccagatgcaatcaatagaatactaagagaagacaaggaggtacgaacatggaaagactcatatatttagacaatgcagcgacaaccaagacggcgccggaggtagtggaggcaatgctgccatattttacagaaaggtatggaaacccatccagcgtctatggatttgccgcggcgaacaaggaagtaatcagccagcagagggatgttatcgcgcaagtgctgggggctaagggcaatgagatctattttaccgcgggaggatcggaagccgacaactgggcattaaaggccacggcagaagcctacgagggcaagggcaatcacatcatcaccacgaagatagagcatcacgccatccttcatacctgcgaataccttgagaagaaaggatttgaagtgacctatctggatgtagacgaggacggcgtagtaaagctggacgaattaaaagccgccatcaggccgacgacgatcctgatctccgtcatgtatgccaacaatgagattggaactatacagccgatcagggaaatcggagagatcgcccatgagcatggaatcctgttccatacggacgctgtgcaggcattcggccaggttcccatccatgtagacgaatgccatattgacatgctcagcgccagcggccataagttaaacggtccaaaaggaatcggattcctatacatccgcactggcgttaaaatccgctccttcgtgcacggaggcggacaggaaagaaagcgccgggcgggaacggaaaatgttcctggaattgtaggtcttggggcagccgtaaagcgtgccgcggatacaatggcggagcggaccggcaaggagacggaactgcgggattatctcattaaccgggtgcttgacgagatcccgcattgccggcttaacgggcacaggacgaagaggcttccgaacaatgccaacttcagcttccggttcatagaaggcgagtctcttctgatcaagctggatatgaaagggatctgtggatccagcggctctgcctgtacatcaggatccttggatccatcccatgtgcttctggccatcgggctgccgcatgagattgcccatgggtctttgaggctaacgctgaatgaggagataacaaaggaagatatcgattacgtggtagactccttaaaagagatcgtaggccacttaagggaaatgtctccgctgtatgaagactttatcaacaagcagaagaaatagtagtagatagattggaggaagaattatgtattcagagaaggtaatggatcattttgagcatcccaggaatgttggggagatagagaacgccagcggcgtaggaacggtaggaaatgccaaatgtggagatatcatgcgcatttacctggacattgacgatgatcagattatccgcgacgtgaagttcaagacgttcggctgcggcgcagcggttgctaccagcagcatggctacggaactggtaaaaggcaagtcgatccaggaagcgatggaagtgacaaacaaggcggtcatggaagcgctggatggcctgccgccggtgaaagtgcactgctctcttctggcggaagaggcaattcatgcggcgctgtgggattatgccgagaggcatgatataaagatagaaggcctcgagaagccaaagtcagatatccatgaaggcgaggaagaggaagaagaggaatattaatccggagaagagtttatggaaaagaagaaagtcgtagtcgggatgtccgggggcgtggactcttccgtggccgcctggctattaaaagaacaaggatatgatgtgatcggagttacaatgcagatctggcaggatgaagaacgcatcgtagaggaagagcaggggggctgctgcggactgagcgcggtggatgacgcgaggcgcgtggcggcatctcttggaatcccctattatgttatgaattttaagcaggaatttaaaacctatgtcatagactatttcatggacgagtatctgcatggaagaactccgaatccatgtatcgcctgcaaccgctatgtaaagtgggagtctcttcttaagaggagtatggagattggagcggactatattgccaccggacattacgcccgtatcgagaggctcggtaacgggcgttgctccctgcgtacgtcggccgccagcgcgaaggatcagacttacgcgctgtatagtctaacccaggaacagttgaaaaggacccttatgccagtaggagaatatacgaaagatgagattcgcaagctggcagggaaaatcggccttaacgtggcggataagccagacagccaggacatctgctttgtgccggatggagactatgcttcttatatagaagccaattccggggccaggatcctgcctgggaattttgtgctttccgacggaacggtggtggggcggcataagggaatcgttcattacaccgttggccagcggaaaggactggggctgtctcttgggcaccccgtattcgtgcttgacatccggccggagacgaacgagatcatcgtaggcaccaatgaagagtccctgacatgccaggtcagggcagacaggattaattttatggccatagaggaccttgctgataagaagagagtctgggccaagataagatataatcaccggggcgcatggtgcacggtggagaagacaggagaagacgagatcctgtgtatatttgaagagccgcagagggcagtcgctccggggcaggcagtcgtcctgtatgacggagagtatgtgctgggcggaggaacaattataggagatgagtagaaagtgataaaatctgacgtgcatatgcacacattattttcccatgattcagaggccacgccaaaggagatgattgagggggccattgggaaagggcttgagatgatctgctttaccgatcattatgataaggatgatgtggaatggggtccggaaagcatctttgatccgcaagaatacttcagggtccttaagcctcttaaggaaaaataccaggataagattgatgtcaggataggcgtggaattaggactgcgtccctatctgggagattattaccgggagttcgcggaaacctatccgtttgaattcattatcggatccgtgcatagcatccagtctacggacccggcatccgggaaactgttccaggacaagacggatgaagaagcctatcgtatagcgtttgaagaaacattgacggatatccaaagattcgacggattcgacgtgctgggacacctggactatgtggtcagatatggaaaagaaagagagaagcagtattcctatcaaaaatacgcggatgtgatagaccggattctgaaagccttgattgaaaaggggaagggactggaattaaatacggcgggcctgaaatacggccttccttttgcgcatccgcggcaggatgtgctgaagcgttacaaggaaatgggcggcgagattataaccattggcgcggatgcccacaggccggagcatattgcctatgattttcagaaggcatcggacatcctgaagggctgcggctttaaatattatacagaattttccagacggaagccgcattttaagcaacttccataaaaatgggaaaagtccttgaatttttgtatcaaatttagtacaataaaatacggttgatgattctttaacgaaggttgagggatttcaaaaatataagactgtgcaaccagttaatacaaactttaggaggaattaatcatggcagtaaaagtagcgattaatggattcggacgtattggacgtcttgcgttcagacagatgtttggagcagaaggatatgaagttgtagcgatcaacgacttgacatctcctaagatgcttgcccacttgttaaaatatgactcttctcagggtaaatatgctttggctgacaaagtagaagctacagaagattctatcatcgtagacggaaaagagatcaaaatctacgcaaaggctaatgctgaagaacttccatggggagagatcggcgttgacgttgttcttgaatgtacaggattctacacatcaaaagaaaaagcatctgcacatgtaaaagcaggagcaagaaaagtcgttatctcagcaccagctggaaacgacctgccaactatcgtatataatgtaaaccacgaaacactgaagccggaagataccgttatctccgcagcttcctgcacgacaaactgcttagcgccaatggctaaggctcttaacgaccttgctaagatcaaatcaggaatcatgtgtacgatccacgcttacacaggcgatcagatgactcttgacggaccacagagaaaaggcgatttaagaagatcccgcgcagctgcgcttaacatcgtgccaaacagcacaggtgctgcaaaagcgatcggacttgttattccagagttaaatggaaaattaatcggcgctgctcagcgtgttccaacgccaacaggatctacgacaatccttacggcagttgttgacggaaccgttacggttgacgagatcaatgcagcaatgaaagcagcagagacagagtccttcggatacaacacagacgagatcgtatccagcgacatcatcggtatgaaatacggctcattattcgatgctactcagacactggcactgccattagataacggaactacagaggttcaggttgtatcttggtatgacaatgagaattcttacacaagccagatggttcgtacaatcaaatacttctctgaactggcttaacacagagcgcttagcaatatattaagactcacgcagggtccggtcttattggaccggaccctttttataattgagaaccagttcttggatgataagggacatgcccttaaaaatataactgaggaggcagccatatgcttaataaaaaatcagtagacgatatcaacgtaaaaggaaaaaaggtgctggtaagatgcgactttaacgttcctcttatcgatggcaagattacagatgaaaaccgtcttgttgcagcgcttccgaccattaagaagttgattgcggacggaggaaaagtaatcctctgctcccatcttggaaagccgaagggagagccggttccggaactgtctttagcgccggttgcggcgcgcctttcagaacttctcggacaggaagtgaagtttgcggctgacagagaagtagtagggccaaatgcgaaggcagctgtagacgtgatgaaggacggagaggttatccttcttgaaaataccagatacagaatcgaggagacgaagaacggagaagccttcagtaaagaccttgcttccctgtgcgacgtattcgtgaatgatgctttcggtaccgcgcacagggctcattgctcaaacgtaggcgttacgcagtttgtagatacggcagtcgtaggatatctgatgcagaaggagatcgatttccttggaaatgcagtcaataatccggagcggccttttgtagctatccttggaggcgcaaaggtatccagcaagatttccgtgatcgagaacctgcttgataaggtagacaccttgattatcggaggcggaatgtcctatacgttcagcaaggctatgggcggaaatgtaggaaagtccctcctggaagaagactattgccagtatgcgctggatatgcttaaaaaggcagaggaaaagggcgtaaaactgttactgcctgtagacaatgtgattgcagacgatttctcgaatgacgccaatacccaggtcgtgctgcgcggcgagatcccggatggctgggaaggactggacatcggtcctgagacagagaagatcttctgtgatgccgtgcaggacgcgaagacggtggtatggaacggaccgatgggatgctttgagatgccaaactttgcacacggaacagaggcagtggcaaaagccctggcagatacggatgcgaccacgatcatcggcggcggagattccgcggcggcggtaaaccagctgggatacggcgataagatgacacatatttccacaggcggcggcgcttccctggaattcctggaaggaaaagaactcccaggcgtagcagcagcaaacgacaagtaaaaagcttggcgaggtattagcgagcctagtgcaggattatgaatagaataggagaaaagaagatggcaagaaggaaaattgtagcaggaaactggaaaatgaacaagactccaagcgaggcggttgccctggtggaagagttaaaaccattagtagcaagcgaggatgtcgacgtggtattctgcgtacctgcaattgatattattcctgtagtagaagcatgcaagggaaccaatatccaggttggagctgagaacatgtattttgaagagagcggagcctatacgggagagatttctccggccatgcttaccgatgcaggaataaaatacgtagttcttggacattctgagagaagagaatatttcgcagagaccaatgagactgtaaataagaagatgctcaaggcattcgagcacggcattacgccaatcatgtgctgcggcgagacgctggagcagagggagcagggcgtgaccatggacttcatccgccagcaggttaaggttgggttcatgggagtaaccgctgaccaggcaaaggcatctgtaatcgcttatgagcctatctgggctatcggaacaggcaagactgctacgacagagcaggcagaagaggtatgtgcagggatccgcgcatgcatcgctgagatctatgacgaggcgactgcagaggcaatccgcatccagtacggcggctctgtaaacgcaggaaatgcagcagaattatttgcgcaggctgacattgacggaggccttgtaggaggcgcttctttgaaggctgactttggcaagatcgtaaactataaataggcaggaagagtgcaataacataaggaccgctggtaactttgcagcggtccttatgcttagaggtctgattatgagatatatggaaattccggttcggacagattgttcgcagccttatgcaagactagaaacctatatactggatacgcctgccgacaagatcaggattgccagaaggcctatggtgatcatctgccccggcggcggatatgagaagttaagctaccgggagggggaacctctggccatccattttatgaaccagggatatcatgcatgcgtgcttcgatattccgtggtgccgtccagatacccggcggcgcttctggaactgggaatggccatgaagctaatccatgagcatgcccaggactggcatgtagatacggataaaatcatcctgcacggtgcatctgcaggcggccatttggttgcaagcctgggcgtattctggcatcagaaatggctcggggagatgctgaaagtggcgccggagacgcttcggcccgcaggactgatgctcagttatccggtaatcacatctgatgctgtcacaggacatttgccaagttttgccaatcttctgggagacagatatgaggagaaactagaagagatgtccctggaaaagcaggtaacaggaaaaacgccgccatgctttctgtggcatacggccacagatgatacggttcctgtagaaaattccctgttaatggcaatggcgcttagaaaggccggcgtgccggtggaactgcatgtatttccagatggagagcatggactgagtcttgcgagcaagctggtagaaagggtggacggctccggcgttcaggaagaatgccaacaatggatcgggctggcagatgcctggcttagtcgcttgtgcaaaggcgcgcaatagattttggattgaaggagattaaagatgagtaaaaaaccaacagtacttatgattttagacggatatgggttaaatgagaatactaccggaaatgccgtagcagaaggcaaaacgccggttatggataaattgatggcagagtgcccgtttgtaaaaggcaatgccagtgggatggcggtaggccttccggatggacagatgggaaactccgaggtaggacacctgaatatgggcgccgggcgcatcgtataccaggaccttaccaagatcacaaaggcaatcaaggacggggacttcttcgagaatccggcgcttcttgccgcatgtgagaatgtaaaaaagaatcattcttccctccacctgatgggacttgtgtcagatggcggcgtccacagccataacgagcacatttacgggctgctggaactggctaagagacagggaatcgagaacgtatacgtacactgcttcctggacggccgtgatacgcctccggcttccggaaaggaatatgtagagcagctggcagcgaagatgcaggagatcggcgtgggacaggtggcgaccgttatgggacgctactatgccatggaccgtgacaatcgctgggaccgcgtggaaaaggcctaccgggcgctggtattcggcgaaggcgagcgggcagcgagcggtccggcagggatccaggcttcctacgataaggataccacggatgagttcgtgcttccgacggtggtagaaaaggacggcgttccgatggcaaaggtaaaggacgatgattccatcatcttctttaacttccgcccggaccgtgccagagagattaccagaaccttctgtgatgagaagtttgaaggttttgacagaggcgagcggatcaagaccacctttgtatgctttactgaatatgatatcactattgaaaacaaactggttgcctttgtaaaagatgagatcaccaataccttcggagaattcctggcaaagaacggcaagaagcaggcgcgtatcgcagagacagagaaatacgcgcatgtaaccttcttcttcaacggcggagttgaagagccaaacgaaggagaagacaggatccttgtaaaatccccgaaggtagcaacctatgacttgaagccggagatgagcgcctatgaagtatgcgacaaacttacggaagctatccggtcaggaaaatacgatgtcatcatcatcaacttcgccaacccggatatggtaggccataccggcgtggaagccgcggcgataaaagccatcgaggccgtggacgaatgcgtgggcaaggcagtggatgctatcaaggaagtggacggacagatgtttatctgcgccgatcacggcaatgcggaacagctgattgacggcgagacaggcgagccatttacggcacacaccaccaacccggtgccgttcatcctcgtaaacgcagatccgtcttacaagttaagagaaggcggatgcctggcggatatcgcccccacattgatcgaactgatgggcttggaacagccaaaagaaatgacaggaaaatcattgctggtgtaaacttaacacgtaacatttttcactttgacacgtaacacttttcaaaagtgttacgtgtcaaagtgcattttgctatgtgtaaaattgttcaaacccctgtgcaaaattgaaaaagaggtgaaatcaatgcatattttgattgtggaggatgacgctgccatccgccaggaattgaagcaattgctggaaaatgcgctttatcaggtaacggcgcttgacgccttcggggacgcggcaggcgatatattgaaggcggatccggacatcgtccttctggacttgaatctgccggaggagtccgggtttgatatctgcaccaaggtgcgggcggtatcggaggtgcccattattttcctgactagccgtacggattctatggacgaactgaccggaatgctcaaaggcggggatgactatattaccaagccattccagcctccgctcctgctggcccgcattgcggcggtgctgaagcgcacccggaaagaaacggaaggggaggcggctaggctcagccataaaggcgtggaactggatgttgccagaggatacataagtttccagggcaggcagacggaattatccaaaaatgaattgaagatcctgcattgtctttttaagaagaagggggagatcgtccccagagtagagattatagaatacctgtgggataatcaggtatttattgatgacaatacgctgagcgtcaacatgacccgcatccgaagcaagttagaggagattggagtggagggcttcatagagacccggcggggaatggggtatcggatatgaagtttatagattttatcaaagatcgggtgatgctccttttgcttcagggattcgccatgttcctcctggcggggttcctctatgccaccggatatccgaccgcgtatggcgcggtaattttcctgtgctggctccttctgctgttggcttatctggcagtggaatactacaggcggaaacgttatttcaagcagatggcggaggtgctggagcatgtagaccagcggtatctgctgggagaactgatgccggaatctttccggctggaagatcacatttaccaggatatgatacgcaagtccaacaagtcggtgatagagcggatccgccagatcgaggcagaacagaaggactaccgggaatatattgaaagctgggttcatgagatcaaggcgccgatcaccggcatttcgctgatgtgcgagaaccacagggacgaacttaccaggcgcattagcctggagaaccagaagatcgagaattacgtggatatggcgctgtactatgcaagatcagaggaagtgtataaggactatgtaatacaggagacagacttgcaggaggtagcccgggaggtgctggcgaagaataagcattatctgatccagaacgggatacaggcggaggttgactgcaggcaccgggcctttacggatcagaaatggatctctttcatcctgaaccagttagtattaaacgctaccaagtataagggggactcaaacgcatgcataaaggtcgagacgcaggagtatgcgcatggcgtccgcctgctggtaagcgacaatggaattgggatcaaggaagaagaactggggagaatctatgacaagggattcacgggaagcaatggaagaacccatgaacgttctactggcatgggactctatctttgcagaaaactatgcggcaggctgggtattgacatctctgccagatcccgggagggcgctggcacgcagatcatcctggaatttccggtaagcagttatctttcaaaactgtaagataactgcaaggcaggccgatacaaacaccgggaagtatctgatatagtcatagtatcaaagaaaaaggagtgacaggaatatgaatgactatatacgcgtgtgcgacgtggaaaaatattacgggaatggctccaatgtgacgaaggccatagaccggctcagtttccaggtggcaaagggagaattcgtgggagtcatgggggcttccggatcgggaaagacgactctgcttaatatgatgtccaccatagaccgcgtgactgcgggacatatctattacggggatgttgacatcacggaactgtcggaagatggcctgtctgatttccgcaaggataacctgggattcgtattccaggactataatctgttagatacgcttacgattgaggaaaatatcgtgcttgccatgacgcttcataaggagggaagggattcgatcaagaagaaatgcgcccagatgctgcgtctacttggaatcacggatataaaggataactttccctatcaggtgtcaggcgggcagaaacagcgctgcgcctgcgccagagcgctggtcaataatccccgcctgattctggcggatgaacctaccggggcgctggattccagatcagcccagacgcttctggagacattttctaatatgaacgcgtcgcttaaggccaccatcctgatggtgacccatgatgcattttctgccagttactgcggacgcatcctctttttaaaggacggaaagatttttcacgaactgatgcgcggctccaaaagcaggagggagttcctcaatgagattctggacgtcctggcgctgacgggaggtgagttatccgatgctcggtaaacttgcctttcgcaatgtgaaacgttccgtcaaagactatctggtatatgtgctcaccatgacctttgtgacggcccttatgtttgcgttcaatagcatcctgttttccagggatgtccaggaactgttcgaagttgcagggctgatggcggctatggtggggatcgccacattttttatcgtgctgatcgtggcctggctgatcaattatatgataagattcatgctggagaagcgcagccaggaatttggcatctatctgctgctggggatgaagaaaaagaagatcgcaagtttgtacatgcgtgaaaatctgttgatgggaacgggcgcattctttctgggaatgctccttgggactttgcttcagcagatcatcatgtccgttctctacagcatgatccagatgaaatacgacctccatctggagttcaatagatactgcattctgatgactgccgcatgctatgcaggctgttacctgctggcgcttttcagatgccgcagaagatttaagaaaatgaacatccatgacttgatgaatgccaataagcagaatgaggagatcaaggaatccaacgagaagttaaaaagatggcttcttccggtttccattctgttcatgctggcatttggagtcttcctgttctgcggcctgattaataatgccgggagcgtaattctgtttctggtgggactcatcctggtaatctatctgttttatacagggctttcctcctggatcatctgctatgtccgggcaaaaggaaaaggaatttataagggccagaacctgtttctgctcaggcagttttcctccaagcttaagaccatgcgttttaccatggggacgctgacctccctttttaccatcgcgttcttaggctgctccatagccatgatgttcagcgactggcagaatcaggttctgggagataaattcccttttgacgtgcaggtatacagcgctgacgtcaatgatgacttccaggacgaactgaagatcattggcaaagaatcggatatagaggatgcctttatctaccacatctatgcgggccagaccaatcaggcaaacgcgtggctatatacgcatctggaagtattcggggattcttacttgaatagcgatggaagtccgaatctgaaaaagattgagaaaaatccggaagaatgctactgcaattatgatacctatatgggtctatcggattacaaccatcttagaaggatgttgggatataaagaggtaacgctatcggacggccagtttgccattcacatcaagcagcgcctgaaagatcaggcaaaaggccttgaggatgccatatccatcaatggggagaatgggaaactgagttttgcgggctactatacggaagccttttcccaggatggccataatggaggggactatgtcatcatcgtcccggatcaggtgattgtgggcatgactccctactacagcgaacttgcggtagatattagaggggaggcgccggaaggcctggagaatcggctggatgatttaagcgacaatacagattttggcggccatgccgagatgaaaggaaacaactgctacgggacggataccattgtcacatactatgccgtgaacctggtgcgggataatctgataccggaagtaaagtatatgctgtcctccatcatattcccagcgttctatgttggcctggtgttcctgtgcgtggctttgacggtgctgtccgtccaccagttaagcgattctgcaaagtataagttccggtacagcgtgctcaagaagatcgggctaagcaggagagaggtatccaggctgatcctgaagcagctgttcggatattacctatgcccggcgctctttgcggcgctgatcagcggcatcgtggcagtatttatcagcaacatcttcattttctatacaggcgtaagcacctcggtgttccagtattttgccatctccctggcgttgtttatgggaatctatattctgtatttcctgacgacttatgtcggattcaagcgaaatgttgaaagtagggagggctaggatatgcataagaaaaatatctgggtttgcatcctgatatccatcctgattctggtcgcagcgcagactgtctctctgctgatcgcaagtgcagcctgtgctgcagggctgccggttccggcgggaaatatcctggcagccctgctctatgcagcccttgctttgtggggaatccgcgtgcttgggaggaagggacttaagatgcgtccttcctccctggggctttcgccagtcaggatccggccggtatggggcgtggcggcagttctgcttccgctggctgtatgcggcatctgcctgctgctgcccggacactttgaagcggttacagctaggcaggcggacgttgtcttgatcttaagcggcgcggcctattatgggatcgcagcggcggttgtggaggaggccgtattcagaggggccatcctcaaaagcctggagagcagatggaaccgaaaggcagcggtcctggcctcgtcggtcttattcggggcagtccatatgctgggagcaagtttaagcctcgtgtcagccgtgcagttgcttctggccggtacggcagtcggaatcctgtttgcactgatcgcttatgaaagcggcagcatctggagcggcgcgctggtacacggcatctggaacctgtttatggtcagccggatcttgagtatcggcccggaggcggacgcatcgtccatcttcagttatgtgttggaggtaaagaatcccctgctcactggaggggatttcggaatagaggcatcggtcatagccatgatggcatatgcggggctggcggcagttgcgtatagcatgatacgaagagagagattaaagatatagcgtaagaacagaaaaacttggcaatgaaacggcgtggtatcaaaaggtaccgcgctatagttttcgatttttttctatctatgcaaccgccaggccggatgttgtgtatactataataaagagaaggcaggtgatagaatgtacgagcaacgattactggaacagttaaagggacggaatgaaattgcgcttgaagaagcggtttctgtctatgaggcgtacatatcagccatcgttttccgcattatcggcagcgcgatggcaagggaagatctgcaggaagtggtcaatgatacattctatagcctgtggataaatgcagaacggatcgatcttgataaaggcagccttagagcatacctggccgccattgccaggaacaaggcaaaaaataagctccgggagcataagacgcagacgcttcttatccaggagacggatcaggtggaagtgacggatttctgtctgggcctggagaaggaggaacgggtgaagatcttgaaggatgcattggacatgctgaagagggatgaaagagaaatcatgatccgctattatttctactatgaatcgacagagaccattgcaggcgagatggatctcagaaggaatacggtgaagtccaaactgatgcgcgcaaggaagaagcttaagatccatctgagggaaagggggatatgtcaatgaaagagaagattacagacctgtttgacgatattcctgtagaactgctggatgagatagaagttcagaaaggaaatggtcatgggaggaagaaaggaatctatattcccaaatgggccgcagtcctggtgatagggcttctctgcctgtttgcgggaacggcagggtacgcggcgatcaagcacccggacctgtttaaaacgtattttggcagcggcgacggacagatagaaaaggatctgatgcaggagcagtaccatgaggccaggaataaggattactgtctgcgggtggaggacgtgctggcagatggagatatcaagtatattctcgtctcagtggaggccttgaatgcagacagccagaaggcgcttaaggagagcgagacattccccgtcatccggattaccggagattcgaagaaaggcactggctcaggaggaggtgcatatgaatatgaccaatacccggacgatgagaagaaatacttcatgttcgagtggaacagcgcgggcagcaactgtacgatcctgtatgcggatggaatgccctccatgccaggccaggactggctcgatgagcatggcgacgagattctgaagatatcttttaaactgcataagaaaaaggataaggccatcgcggtcgttccatacaagaaccaattccctgatcatataggcttcgacagggtggagatccgcaggatgagcgtcagggtctccggggagtcgagaaaggcggatgacagttccggcagcatgggaggatgggagtattattaccccaccgttacggcagtgcttgaggatggaaccagcgtcaaaatcatgaaaggcaacataggatatgaggaggccgggacggacaggacacatccatacgggggcgccagtggaagttatagcgagggaagggacggaaagatgaagatagaatatatggtcaaattcagaaaagcgctggacattgacaaaatcgacaaggttatgatcaacgatacggaatatgacgtaaaataatatttaaaaaatgagatattttctccttctgcaaggtatgataggtgaaaggcttttcaaaaaagaagaaactgcttgcggggtgtggctgttggaagaaggaaaatatattgtggctgttgaaacgaataaggatatggtataccgtattgcattgcatgactgtcggaaccggcacgatgcagaagacattatgcagatcgtgtttctcaaactgtaccgctcagcggtggcatttgaaagcccggagcatttgaagaactggctgatacgggtgacggtgaatgaatgcaggcgaatgtacgtctccccctggaagaagcatgaggaatgccgggaataccttcccgaagaaagcgcggcctggggctttgattcagaggaagcaaggagggatcaggagattcttcaggcagtcatggctctgccaaggaaatacagagtgccggtctacctgtattattatgagggataccaggcggcggagatcgccatcctgctaaagaagaatccttccaccatacagacgcggctgatgcgggcaaggaagcatttaaaaatatcgttggaggaggcaggaatatatggaagatagatttccagaagaagaatacaggagagtgtgcagcgccctgaaaccctccttccaggcagaacaggaggtcgtgaatatggcagagccggggaaaaggccatggcgcaagaagaaggcattcgtcacgctggcagccgtgctggcactgacgctatccgtatccatcgtgtcggttgcggctacggacggcaagatcgtagaggaagtgaaggacaaggtaagcttgtggtttcggaatcttacgctggatgaagaggcgtcaacgcaagatcatatggtgcttcgggcggaagacgggacgtacattaccattgatcaggatgaacggaatccaaaactggtgtaccacgaagacagcaagtcattgggactggcgattggcggccaggagatcgacattacggaagaattgctggaagacggcgtatatacgacggaatatacttatgaaggcaagacgtatggcgttacgatccagggagaattagagacggcgcagatgaaagtagagccgcagtaagaagatgggatagcgggaaccttccggcaaacggaggctcccgctatttttgcggcagccggacgcagaattgccgcttgcagaagcggctggaacatactataatcaaggtcagattacatgtcaggcaaaaggaaggagttaagatggaaaaaagatatgacacatttttctttgatttagatgggacgatcacagattcttccctgggaatcacgaattccgtaatgtatgcattaaaaaaatacgggatcgtggagacggacaggcgcaaattgtacaagtttatcggtccgccgcttacggattccttcccaagattctatggattctccgaggaacagaccttagaggcgatcggctactaccgggagtattataaagacagaggaatttttgaaaaccgggtatacgatggattcgaggcggtggcaagcaaactgaaggaagatggaaagacgctggtggtggccacgtcaaagccggagccctttgcgaggcagatcatagaacacttcgggctgtcgccttattttgactacgtggcaggcatggagcttgatggcggccggggtacgaaggcggaggtgatccgttatgcgctttcaaactgccggacatccgagcgatccaaggtgctgatgatcggcgaccgggagcatgatgtggctggggcaaaggaaaatgatatccactgcctgggagtgctgtatggattcggaagccgcgaagaattggaggcagctggcgcggactatatcacggaggatgtggaaggaatattggaatttcgttaaaatctccgccatcctattgacaaatccaaaagatgttgttatgattaaaaaacagaacgcactctgtttttgaaaacgcaaatgggaaagaggtgcaatatgcaaagagtttattcattaatcgtcgacaataatcccggcgtcttaagccgtatcgcaggactgttcagcaggcgcggatacagtattgacagtatcacggcgggcgtgacggcagatccgagatttacaaggattaccattgttgcaagcggagatgagttgatcttgtcccagattgaaaaacaggtaaggaaactggaagatatcatcaagatcaaggtgcttaagccaagcgagtctgtctacagggaactgatcatggtcaagatccgtgccaatgcggcccagagatcagagatcatctctatcgcggacatattccgggctaagatcgtagatgtggagaaggagtctttgatggtagagcttaccggcaaccagtctaagctggacgcttttttaaatcttctggacggctatgagatcctggaacttgccaggacgggaattaccgggctttcccggggaatcaaggatgttacatacattgactagaggcgcattttaaatgggagcagatgatttgtccgcccttatttaacaatacaaattcaatttaatcaaaaatgggaggaatgctaatatggcagcaagaatttattatcaggaagattgtaacttatcattactggaaggtaagacaatcgcaattatcggctacggaagccagggacatgcgcatgcgctcaacttaaaggaatccggatgcaacgttatcatcggcctttacgaaggaagcaagtcctgggctaaggcagaggcacagggactgaaggtgtacaccgcagccgaggcggcaaagcaggcagacatcatcatgatcctgatcaacgatgaaaagcaggcggcaatgtacaaaaaagacatcgagccaaacctggaagaaggcaatatgctgatgttcgcgcatggcttcgcaatccacttcggacagatcgttccgccggcaaatgtggatgttacaatgatcgctccaaaggctccgggacacacggtaagaagcgaataccaggctggaaaaggaactccttgccttgttgcggtagagcaggattatacaggaaaagcgcttgataaggcgcttgcatatgcgcttggaatcggcggagcaagagccggcgttcttgagactacattcaggacagagacagagacagaccttttcggcgaacaggcagtactttgcggcggcgtttgcgcattgatgcaggcaggcttcgatacattggtagaagcaggatatgacccgagaaatgcttacttcgagtgcgttcacgagatgaagctgatcgttgacctgatctatgagtccggatttgaaggaatgagatactctgtctccaatacggcggaatatggcgattatatcacaggaccaaagattatcacagatgagacaaagaaggcaatgaagaagatacttgcagacatccaggatggctcattcgcaaaagagttcttattggatatgtcacaggcaggcggacaggcgcacttcagagctatgagaaagctggctacagagcatccgtcagaaaaagttggcaaggaagtcagaagcctttacagctggagcgactccgagaagctgatcaacaactaggaagcatagaaggtacatataagaactggccccgtactccaatggagtatggggcttttgtaatgagtgaaggccaggatatagaagattctgaaaaatgaagaaatattgctgtatttctgatatcagtatgctaaaatgaaggtaacagataaggaacggatgacaatagaagagaaaggagagtgaactatggacgtgaatttacgtgatcttcggtcagtcaggaatccaaaggtgcgcatcaagatcatgcaagggcatttcgcgaggagccattcccatgtgaatacctacattgatatctccaccatcaaatccaggtgcgatcatgccagggaagcggccaggatgctgacggagccatatctgtcatcggcggaagtggataccatcgtatgcctggacggcatggaagtggtgggagcctttatggcggaactgcttgccgcgccggggtccgtgtcggtaaaccgggggaagaatatctctattgtagcacccgaatcaaaccagctgggacagatgatgttccgggacaataccaagcgcatggttggtggacagaacgtgctgattctggcgggctcgttaaataccggaaagacgatgcttcaggcaattgataccatcctttattacggcgggaatgtgaacggcgtatgctcgatattcagcgcagcatcaaaagttgcaggactggatatccatgcggcctttactacggcggatatcccggattaccaggtatacccaagccatgcctgcccgctgtgcaaagcaggagtaaaggtggatgccatcgtcaatagttacggatattccgaactataggcaccgcatgcattttatgtcaataaactatcatattttacagggaggaaagagcaatggacaagacaatggaagggttcgaagacctacgctctaataagaacccgaaagcgcgcatcaaggtaatgaaagggcatttcgctacaagcaattcgcatctgaatacttatatcgatatgtctacggtcaagaccaggcatcacaattccagggaggcagccagagtgctggccaatgagtatctgaacaatacttatgtgaacacgatcgtgtgtctggatgagacggaagtgatcggaacatttctggcagaggaactggcagacaccagcaggctgtcactcagcgccgacaataatatctccgtcataacgccggagtacaacactctgggacagatcatgttccgggataacaagcagcgcatgatcgaaaatcagcaggtattgattcttgccgcttccgtcactacaggcaagacgattagtaaagccatagagtccatcctatactatggaggaactgtgtgcggagtcagcgccatcttcagcgccgttactaaggtggcaggcatggagatcaagaccatattcaccagcaaggacattccggattacagggcctatgaacccagcgactgcccgatgtgcaaggcaggccagagagtagaggcgatcgtcaacagttttggatattccaagctgtagcagatattaggaaacgcgatttcctgtcgcataaaaaaacagccattgacggtatggctgttttttgcatgcaactctctatctattaagcaattccgttaacggcttttgttaaacgggaaatctttctagagcatgtgtttttgtgataaacacccttgcttcctgctttgttgatttcaacgatagcaacttttaatgctgctttagcagcttcagcatctttgtttgcgatagctgtttcaactttctttacgcaagtttttaccttagatttgattgctttgtttctagcagcttttgtttcgtttactaaaattcttttctttgcagatttgatattagccaatttgtccacctccaatatcctatatttcgattttctcgattccagttcgttagagccggacacggacgatctaacgaaacacactaatttattttaggacacagaaagaattctgtcaatacatatttctcaaaatattgcaaaaactagcaaataaattatgactaaagtgaggatgtaagggatgattgagaagtatagcatcagaacagacctggctctcgagcagaaagagagattcgagtcggacaatgtagaagtacaaggcgtcgtgctggaagaagattacgacgaggagagggagatcaaggtgaccactgtaaagatcgagacagagaatggcgctaagacgatgggaaagccggtcggcacgtacatcaccatggaggcgccgaacatggcggtgccggatgaagactatcaccaggagatatcaaacgagctggcaaaattcctggagcggttcataaaaagcgacaaggaagaatattccgtgcttgtggtggggcttggcaaccggaaagtgaccccggacgctcttgggccgtacgtggtggataatcttaatattacccggcacatcatcagagaatatggcagatatgccatgggagaagatgcagtcaacttaatcagcgctatcgtccccggagtcatggggcagacaggcatggagacggtagagatcatcaagggcatcgtcaaagagacgaagccggacatcatcattgccattgacgcgcttgcggccagaagttccagaagactaaaccgtaccatccagattgcggataccggcatcaatcctggatcaggcgtaggcaatcaccgcaatgccatcactaaagaaacggtaggcgtcccggtcattgcaatcggcgttcccacggtcgtagatgcagctacgatcgtcaacgataccatggagaatctgatagccgcactggaaagttcagagaccttaagaggggtgggcgtggtcatgcagggctataatgcggcggaaaagtatgaactggtcaaagaactgatatcaccgcacctaaacggcctgttcgtaacgccaaaggacatcgacgagacggtaaagcgcatcagcttcaccatatccgaggcattgaatctgctgttttccaaaggacatgcacatattaaggaaaatagcgtcatatagtattaagacacaaaatatatgatgtgctgcccgctttatgcagtgggcagcgttttcttaaagcggagtggataatgtgggacaaaaacagcggatcagccgtatcatgatagcggccatcgcaggaatcctggttctgtatgcgtttatgcaggtatccctgcatccggtaaagaaggtgcaggatggaatcaaccgtttcctgatggagaagtcagaagaaacgtatctgaccgggttcgcctatctggaaggcggcaaagaggcatccttttcagaatgggtgacagaaagcgctatgaaacttgtgcctcttggaacctatgtggagggcaaggcatccgtccatgcggatgtggaagatgaggagacgtacgcgatgattctggcccaacaggccaatgatgaaaatgcggtggatgaaaacgggcagctggtgggaggcgatgacaaggaagaggaagtcgcacagacatccggaacgccaattgatacctccatggaaaatctgaaaaattttgaatacctggtaggaaacttctatacgatagatggaaatacgatggcagacggggatctgctcaatgcagagaatctaatgggaaaaaacctgaagatcgaccaggcttcaggaggtccgaaggtgctgatctaccatacgcattcccaggaggcgtttgcggattcgacagagggcgacgccagcaccaccatcatggggatgggcgcctatctctcagacctgttaaataatacatacgggatcgagaccttgcaccacgaaggagtgtatgacctggtggacggaaaacttgaccgaagcatggcataccagctggcggagccgcagatccagaatattcttgccgagaatcccagcatcgaggtggtcatcgaccttcaccgggacggcgtggcagaagggactcatctggtgacggagatcaacggcaggcctacggcgcagatcatgttctttaatgggcttagccgtaccaaggccaatggcaatataagttatctggccaatccatacatagaggataacctggcattctctttgcagatgcagattgcggcagccaataagtatccgggatttacccggcatatctatctgagagcctaccgctataacatgcatttaaagccgaagactctgctgatagaggctggagcccagacgaatacggtggaggaaatgcgcaatgccatggaagtgctggcagatacactagatcatgtacttacaaaataaaaattgtttgattaatacaatatttcgtgctaatatattggcaatatggaaaagtgtgcccaatggggcacttttccacgttctagaatatgtaggaatatacagtggaaaggatatatgagaatggctaagaaaaatacatacgatgcagacagtatttccatactggaaggactggaagcggtacggaaaaggccgggaatgtatataggaagcgtttccaccaaaggattgaaccatctgatctacgagatggtggacaatgcggtggacgagcatctcgcaggctactgcagcgagatcagggtgacacttgaaaaggatggatcggccaccatctcggataacgggcgcggcgttccggtagatcttcacgcaaccggagtttccgcagagcgcgtggtatatacgacgcttcatgccggaggtaaattcgatgattcggcttataagaccagcggagggcttcacggtgtcggatcttccgtagtcaacgcgctgtcaacgtatatggatgtggaggtcagtcgtgacggctatatccatcatgacaggtatgagaggggaaagccggtgatcgaactggaggacggactgctccccaccataggcaagacccgtaagacagggacgaaggtaaactttcttccggatgataccatatttgagaagaccaggttccgggccgaagaagtcaaaagccgcatgcatgagaccgcatatctgaatccggaccttacgattatattcgaggacaggcggggcagcgagacggagcatatcgtatatcatgagccggagggaatcttaggattcatagaagacctcaattccaagaaggaagccgtccacgaacccgtatatttcaaaggcgagtccgatggcatcgaagtggaagtggcgttccagtatgtcaatgaattccatgaaaatgtcctgggattctgtaacaatatctataacgcggaaggcggaacccatctgaccgggttcaagactacctttaccacagtcattaaccagtattccagggaactggggatcttgaaggagaaggatgcgaacttcacaggcgcggacatccgaaacggtatgacggcgatcatctccatcaaacatccagaccccagatttgaaggacagacgaagacgaaattggacaaccctgacgcggcaaaagcgtgcagcaaggtgaccaatgatgagatcatccgctattttgaccggaatctggataatctgaagaaggtgatcagctgcgcggagaaggcggcgaagatccgcaagacggaagagagggccaagactaatcttctaacaaagcaaaagtattcttttgacagtaacgggaaactggcaaattgcgagagcaaggatgccgggaagtgcgagatattcatcgtggagggagactcggccggaggctctgctaagacggccagagacaggatgtaccaggcaatcctgccgatccggggaaaaatcttaaatgtagaaaaggccagcatagacaaggttctggctaacgcggagatcaaaacgatgatcaatgcctttggctgcggcttttccgaaggatatggcaatgatttcgatattacgaagctgcgctatgacaagatcatcatcatggccgatgcggatgtggacggcgcgcatatctctacgctgcttttgactttgttctatcgatttatgccggaactgatctatgaaggacatgtgtatatagccatgcctcctctgtataaggctatgccgaagaagggagaggaagagtatctctatgacgacaaggcactggagcgataccgtaagacccacgatggcccattcaccctccagagatataagggacttggagagatggacgcgcagcagctctgggagaccactttgaatccggagaccaggatgctcaaactggtggaaatcgaggacgccaggatggcatccggcgtaacagagatgctgatggggagcgaggttcccccaagaaggacatttatctatgaaaatgctacggaagcagaactggatatatagcgaggtaaggagagggaaagatgcaggattcacaaatcataagaaccgaatactctgatgtgatgaagaagtcatacatcgactatgccatgagcgtcatcgtggccagggcccttccggatgtgcgggacgggcttaagccggtccagaggcgcacactctatgacatgtacgaactgggtatccggtatgacaggccctatagaaaatgcgcccgtatcgtgggggataccatgggtaaataccacccccacggagacagttccatctatgaatccctggttgtcatggcccaggaattcaaaaaaggaatgatccttgtggacgggcacggaaacttcgggtccatagaaggggacggcgctgcagccatgcgttatacagaggcgcgcctggccaagatcacccaggacgcatatcttgccgatctggacaaggacatcgtggactttatgcccaactttgacgagacggagaaggagccggaggtgcttccagtgaggattcccaatcttctggtcaatggagcggaagggattgcagtcggaatggcgaccagcatccccacccacaatttgggagaggtgatcgaggcggtcaaagcctatatgaagaatgacgatatcagcacgaagcagctgatgaaatatatcaagggaccagacttccccacagggggaatcgtggtcaacaaggacgaattgctgaatatctacgaagcaggcagcggaaagatcaagatccgcggcaaggtggaagtagaagagatgaaaggcggcaagaaccgcctggttatcacagagatcccatacaccatgatcggcgcgggcatcggcaagttcctcaacgatgtctgcaccctggtggagagcaagaagaccagcgacatcgtggacatatccaaccagtcttccaaagagggcatccgcatcgtcatcgaactgaagcggggcgcggatgtggagaatctgaccaacatgctctataagaagacccgcctggaagacacctttggcgttaatatgctggcggttgcaaacgggcggccggagacgatggggcttaagaagattattgagcaccacgtggacttccagttcgagctggctaccaggaaataccagaatcttctgaaaaaggagcaggacagaaaagagatccaggaagggctgatcaaggcctgcgatgtgattgacctgatcatcgagatcttaaggggaagccagtccgtaaaagatgccaaagcctgcctgaccaacggagtgacggagaatatcaagttcaagtcaagcatatcaaagaagatggcggccatgctccgctttacagagagacaggccacggcgatcctggagatgcgcttatataaattgatcggcctggaattggaagccctgatgaaagagcatgaagagacgctcaagaacatcaccagatatgaggatatcctgaacaactatgattctatggcggaagtcatcatagcagatctggacaagattaaaaaagaatttgccagaaagaggcgcacggccattgagaatgccgaagaagcggtttacgaggagaataagatcgaggagcaggaagtcatattcctgatggaccgatttggctacgccaagacggtagatacgaatatttacgagcggaacaaggaagcggccgatgcggagaacaagcatgtgctttcctgcatgaacacagggaaactgtgcatctttacgaatacagggaagatgcatcaagtcaaggtgctggatctgccttatggaaagttcagggacaaggggattcccatcgataatgttagcaattacgacagcacccaggagaacatcgtatatatctgcgacgcggaacagatgcgctacgcaaggctgctttttgcgacgaagcaggggatgattaaaaaagtagaaggaaatgaattccaggtggctaaacgcaccatcgcagccaccaagcttcagccggaagacgagctgattagcgtgcaggtgatcaccgacaaccagcaggtagtcctgcagactaaggagggctatttcctccgcttcccggcacaagaagtgtccgggaagaagaagggagccatcggcgtcagagggatcaaactgaggaagaatgatgaattggaacatgcgtacctgtttgaggaaggtacggaggccaaggtcatctttggcgaaaaagaagtgacgcttaaccgtctgaaagtggcaaaaagagacgggaacggcacaaaggccagataaaaaacataaggagaccactagttatgatacaggatattgaaccacatgaataccggaatgaataccagccgctgaagccggataaagacagcatcttcctcgcctacagaggcaggactatcctggccgcaatggaagggcggcagatccatttccctacatttgacgaaatggaagcctatatgggcaaacagaaactatacgaagactatacctatctctttgccattgacggcatgagattctatctgggaaatccgctgggcatctcagaagaggatcaggatattgatttcaggaagatcaaaggatacgaaatgctggatacccagacgctgcgggagggagggccaaagtacctgaactttgcaggagtcaccgggtggcagctgcacagatggtatacttgcaggagatactgtggaagatgtggaagccctatggtaaaggacgccaaagagcggatgatgttctgccccgagtgccatctgatggaatatcctaagatatcgccggcggtcatcatcgccgtgaccgatggcaacagaatcctgatgtccaagtatgccgggcgggaatataagaaatacgcccttctggcaggattcaacgagatcggggagaccatagaggagacggtaaagagagaagtcatggaagaggtcggccttcaggtcaagaatattacctactataagagccagccttggtctttttccgacacgctgctcatgggattcttttgccagttggacggagaggataagattacgcttgaccaagaggaacttgcgcttgcccagtggtttgagcgggaggagattccagtgaaggaggatgacttaagcctcaccaatgagatgatgatcgcgttcaagaatggcaggaaataagagaataagagaaaaatatgaaaatcccttgcttttgccaggatatggtgttatactaaacaacagttacataaagaaatcggcagaagagtgaacgcaaagttcactcttctttgttgataaggaggaaatttatttgtcaaaaagagaaatttacgaacagaagacagaagccattctgatgccaattgtagaggagcacggattcgaattggtggatgtagagtatgtaaaagaaggcggtacctggtatcttcgggcctacattgataagccgggcgggatcaacgtagatgactgcgaggtggtaagccgcaggctgtcagacatcttggacgagaaagactacattgaggaagcatatatcctggaagtcagttccccgggccttggaaggcctcttaagaaagaaaaggattttaagagaagtctgggagaagaagtagatgtgaggacataccgtatgatagaaaagcagaaggaatttaccggactgcttaaggattacgatgatgcgactgttaccatcgagatggaggatgggacactgaaaacatttgaaaaaagcgatatcgcgcttattcgtctggcgtttgatttttaaattaggaggagaatagtaatgaacacagaattattagaagcgttgaatattttggaagaggaaaaggatatcagcaaagagactttgctggatgctatcgagaattctctgctgaatgcctgcaagaatcattttggcaaggctgataatatcaaattaatcatggacagaaccacctgtgactatcagctctttgctgagaagacggtagtggaagatgtggaggataagttagagcagatcagcctggaagatgcaaaagagatcgacagccagtatgaacttggcgatattgtgcagatccccatcgagtccaagtcatttggccgtattgccacgcagaatgccaagaacctgatcctgcagaagatccgcgaggaagagaggaaagtcgtgtatgaccagtatttcgagaaagagaaagatatcgtcacaggtattgttcagcgttatgttggcaagaatatcagcatcaatcttggcaaggcggatgcgatgctgacagaaaacgagcaggtgaagggcgaggtattcaagcctaccgaacgtatcaaattatacgtagtggaagtaaagaacacgaccaaggggccaaagattctggtttcacgcacgcatccggaattggtaaagcgtctgtttgaatccgaggtgatcgaggttaaggaaggaatcgtggagattaagagcattgcgcgagaggcaggaagcaggacgaagattgccgtatggtccaacgatccggacgtagatccggtaggcgcatgcgtcggcatgaacggggccagagtcaatgccatcgtcaatgaactgcgaggcgagaagatcgacattattaactggagcgacaatccggctatcttgattgagaatgcgttaagcccggcaaaggtcatttctgtaatggccgatccggatgagaaggcggccagtgttatcgtcccggattaccagttatcgctggccatcggcaaggaggggcagaacgcaaggcttgctgcaaggcttacaggatataagatcgacatcaagagcgagacacaggccatcgagtcaggcgaacttccggagaactatatggaattaagcgaaggcgtatatgaagaagagatgtacgaagagccttatgaagaagattacgaggaaggatatgaggaagacgcgtatccggaagatgagatagaatttgaagaagtagatgatacagaggaataggtgattgtttgagcggaaataaaaaggtgcccatgcgcaagtgcgtgggctgtcaggaaatgaagagtaaaaaagagatgattcgtgttatcaggactgccgagggcgaatttcttctggattccaccggaaggaagaatgggcgcggagcatacatctgtccggccaaagaatgcctggaaaaagccaggaagagcaaaggcctggaacgttcattcaagcagtccattccggaagaagtatatgatgcgctggaaaaggagatggatatacttgaatcagaataagatactgtcgctcattggtctggccacaaaggcaggaaggacggtaagcggggagttcagtacggaaaaggaagtaaaatccggcagggcagctttggtgatcgttgccgatgatgcgtctgataacacgaagaaaaaattcaaaaacatgtgtgacttttatcacgtgccaatctatttttataaagataaagataccttggggcatgcaatgggaaaacagttccgggcgtcccttgcgatattggatgagggatttgcaaaaggaatcaggaagcatatggatacagaagagaacacaattgcatagaggaggtagttagtatgtcaaaaatcaaagtatatgaattagcaaaggagttggatgttccaagcaaggaagtcatcgaattccttggtggaaagaatatagaagtaaagaaccacatgagttccctggaggatgcggatgccgatatggcaagaaaggcattggcgaaaagtaataaggatgcggctccgaagccggaggccgaggcgccgaaaaagaagaacattgttcacgtgttccggccccagaatacccagaatggcgcaaagcagggcagaaggccgcaaggacagggacgcccgcagcacaaccgtcaggcaccacagcagggaaggccgatgcaggtcaataatggacgccctgcaaaacagcaggcccgtccggcagcgccagcccaggagactacccagcaggcaaggccacaggagagaccggcagataagtcctttgagcaggcaaaacgtccggcagccgcaagccaggaaagagcccagacgcaggagaggcaggcagaaagaccggcatcagacagaagccaggcgccaagacgtcaggaaagaagcgatgaccgccgtcaggataccagaggaaattccggaaatcgtccgcagggaggtcgtccacagggaaatcgccaggatcgcccgcagggaagccgtccgcagcagggaggccgtccacagggaaatcgccaggatcgtctgcaaggcgacagaaatcagagccgcaagccaggcgaaaggccggacaggcgcaataacgacaggagaagcaatgatgccattccagcgcctgaagcaccggcacagaagccgcagcgcagcaaggtaaagggcaaagacgatcataagaagaaggagtaccgccgcggggaagaagacgggcttggaaagggcaaaaaaaagaacgagccaaagcagccgcttcagaagccgcagcaaagagtgcagaaagtggaagagcagattaagtcgatcatcattccggaagtacttacgattcaggaattggcagataagatgaagatcgttccttccgtgattgtaaagaaattgttcttacagggcaaaatcgttacggtgaaccaggagattgattatgagaccgcggaagagatcgcgctggagttcgatgtcctctgcgaaaaggaagaagtcatagatgtaattgaagaactattgaaggaagaagaagaggatgagaagaagatgaagaagcgtcctccggtagtctgcgtcatgggccacgttgaccacggcaagacttcccttctggatgccattcgccataccaatgtgatcgacagggaagccggcggaattacgcagcacattggagcatatgtagtagaagtaaacggagaaaagatcacattcctggatacgccgggacatgaggcgttcacggctatgcgtatgcgtggcgcaagttccacggatatcgcgattcttgtagttgctgcggacgatggcgtgatgccgcagacggtagaggcgatcaaccatgcaaaggctgctggcgtagagatcgtggttgccgtcaataagattgataagccaagcgcgaacatcgaccgtgtaaaacaggaattgaccgagtacgagctgattccggaggactggggcggcagtaccatctttgttccggtatctgccaagaccggagaaggcctggaagatctgatggaaatgatcgtccttactgcagaggttatggaattgaaagccaatccgaaccgccgcgcaaggggacttgtcctggaagccgaactggataaaggaagaggctctgtggccacagttctggtacaaaaaggaaccttaagagtcggcgattccatcgcggcaggctccgcccacggcaaggtaagggccatgatggatgacaagggaaggcgcgttaaggaagccggcccatctatgcccgtggaaatccttggcctcaatgacgtcccaaatgcaggagaagtattcgtaggatgtgcaaatgataaagaagcaagaagctttgcggagacatttatttctcagagcaaggtaagactgctggaagataccaaatccaaattgtccctggatgatctgtttacccagattcaggaaggcaatctgaaagaacttggcatcgttgtaaaagcagatgttcaaggctccgtagaggcaatcaagcagagccttctgaaactgtccaacgatgaagtcgtagttaagatcatccatggcggcgtgggcgcgatcaatgagtcggatgtaagcctggcttccgcatccaacgccatcattatcggattcaatgtccgcccggacgctacggcaaaagagactgcagaccgcgagggagtagaccttcgcctgtaccgcgtaatctataacgcgattgaagatgtagaagcagcgatgaagggaatgctggatccagtctttgaagaaaaggttctgggccatgcggaagtccgccagatattcaaggcttccggagtgggaaccatagccggatcctatgtcctggatggcacgttcgaaagagactgctctgtccgcattacaagggatggaatcgtcatattcgaaggccctctggcatccctgaagcgctttaaagatgatgtaaaagaggttagagcaggatatgaatgcggatttgtattcgccaactttaatgatgtaaaagaaggcgacatcgtcgaagcattcaagatggtcgagattcccagataattcggggctctggccgtctccctgcggaaaagagggagtaaaatgagaaaaagaagtataaagaatacaagagtcagcacagaagtgcagcgggaactgagcaatatcataagaggcggaatcaaagatccccgcgtagcgccctggacttccgtggtcacggcagaagtggctccggatctgaagacctgcaaggcttatatcagcgtgctgggcgatgcgcatgagcaggaagagaccatcaaagggctgcagagcgcggagggatatatccgccgggaactggcacgcacgctgaatctgcgcaatacgccggagatccggttcgtgctggaccagtcgattgaatatggagtaaatatgtccaagaagatcgatgaagtgacaaagggattaaaatcagagggtgatgcagatgctgaataatattcttggtgaggcttttcgtattgcgattggcggccacgtgcgtccggatggggactgcgtaggctcctgcatggggctttatcagtacattaaggagaattataaagacaggcgtgtagacgtctatctggaggagataccggaggcctatcggtgcatagaggccacaaaagacattaagcatgaggtgccggaaaatacaaaatatgatttgttcatctgcctggactgcggcgacaaggatcggcttggattctcggctttactgcttgatcaggcagtacgcacctgctgtatcgaccatcatatcagcaatacggaatttactgactataattatatcgtgccggatgccagttccacatcggaactgatctataatctgctggatgaagagaagattacgcttggggtggcagaggctttgtatcttggaatcgtgcatgatacgggagtattccagtattcctgcgcgggcccttctacgtttttgacagcggcaaaactgctggaaaagggcgtggacgcgccgcgtatcattcaggatacgtattatgagaagacctatgcccagaaccagattcttggcagggcattgctggaaagcatcctgttcatggaaggcagatgcattgcatcctatatcacaaagaacactatggacttctatggcgtagaccccaaggatctggacggtgtggtaagccagctgcgtgttacgaaaggcgtggaagtggcgatctttatgtacgagttggagaccaacttatataaagtcagcctgcgctccaagtatgacgtggatgtaagcaaagtagcacagtactttggcggcggcgggcacaagaaggcggcaggccttacgatgacaggaacgccccacgatgtgctttgcaatctggcaaggcagattgaacttcagattgaaactacattagataaataggatgggagaactatatgatacacggcgtgttaaatgtgtataagggaaaagggtatacatcccatgacgttgtggcgaaactcagaggaatcacagggcagaagaaaattgggcatacgggtacgctggacccggatgctaccggcgtcctgccggtatgtctgggaaaagccacaaaattgtgcgatatgctgacggataaggacaagacctatgaagccgttcttctgctgggcgtatctaccgatacgcaggatgcagggggcgaggttcttggcacgtccgatacggcaggccttggcgaaaaggaggttcgggaggcgatacaaagcttcgtgggcggatacgaccaggttccgccgatgtattcggcgctgaaagtaggcgggaagagattatatgaacttgcaagagaaggcaaggtggtggagcgaaaggcacgcccggtggatatttaccagatccgtgtgcttaagatggatcttcccagggtatggatggaagtctcctgttccaaagggacttatatccgtacactatgccatgatatcggcgaaaagttaggctgcggcggctgtatggaggaactgttccgtacaaaagtcagcagttttctcttgtcagacagtctgacgcttgcggacatcaataagaggatgcaggagggaacgctaggggaagtcctggtgccggtagatgccatgtttggcggatatcggaagattgtggtaaaggagccgtggatatccctggccagaaatggaaactccctgcccataaaggcggtgactggcggggaagggatagaagacggggaagaggtaaggctgtataacgaggccggacagtttatcgcaatctatgcctggaaggaagagagaaaagaatatcacatcgtaaagatgttttttaacgaatatatctaacggttaagagggacaagtatgcaatatattagaggactgtctaactataatgacagcgggaaatcagcagttacgtttggaaagtttgacggcctgcacaagggccaccagaaactggtgaaaaaggtacgggaatttggagaaaagaataagatcaacagcattgtatgcgcgttcgacatgcggccgctgtgggaagaaaagggcctgaatccgcaattactgatgaatggcaaagagcagcagatgcatctggagggtcaggtggattatctgatcgaatgtccttttaccagggagttcagccagattccggcagaagaatttattaaggatatcatcaaaggactttttcacgcggattatgtggtagtaggaacagatttctgctttgggcatgacaagcaaggagatattcacatgcttgcagcctatgaaaaagagtgcggatatgatctggtggtagtggagaaagaacggtatgaagaccgcattatcagcagtacctatgtaaaagaagtgttaaggacgggggacatgaagctggcttcccggctgttaggctatccttatggcctgacgggaatcgtggagcatggaaagaaactgggaaggacgcttggatttcccacttttaacgtggcctggcccaaagcgaagatcgcgccgcccaacggcgtgtatctctgcgatgtgactgtagacaaagacagatatcacggaatcgctaatgtaggggtgaagcctacggtgaccagtgagaatcggttgttgatagagagttttttattcggctatgcaggaagcgcttatggaaaagaagtgaccattgaactgctttccatgtgcaggccggaacaaaagtttgacagtattgaagagatgaaggcatgtattgacagggacatcgaggcgggaaagcatttcttcgggatggataagtaaaggagaatacgaatgagtatcacaacattttttatgttgcttgggggactaggcttattcctgttcggcatgaagttaatgagcgaggggctggagaaagctgcaggcgccaagatgcgcggcattctggaatttttcacaaagaaccgttttatcggcatgctggtaggtatcttgtttacggctgtagtgcagtcttcaagcgcgactacggtcatggtagtcagttttgtgaattctgggttgatgaatctgcttcaggcttccggggtcatacttggagccaatatcggtaccacggtgacaggacagctgattgcattcaacctgtcagatatcgcgccgctgttcgtcatggcgggcgtgatcatggtcatgttctgcaagaaactgagcatcaagagggcaggagaagtcgtgctgggattcggcatcctatttatgggtctgagcatcatgggtgatgccatgacatcgttcaaagaatccccgcacattatagaactgctgaggacgttgcgcaatccatttgcggcaatcctggtaggattcgtgattacggcgatcctgcagagttcttcggcaaccgtcggcatcgtaatcctgatggcatcccagggactgctggcatttacaatctgcccgttcctgatcttgggatgtaatatcgggtcctgcgtatctgcgcttcttgccagtcttggcggaaagaaggatgcaaaacgcgcggccatgattcattttctgtttaatgtcgtaggatcggctattgccttcattattctgatggtagcgctggatccgatcacacagggcatcctgcacctgtcccgagggaatacggcccgggcggtggccaatgcccatacgcttatgaaggtgttcgaagtggtcgtactgttcccgttcatgggatggatcgtgaaggcaacctacatggtagttcccgggaaagacgccacgctggaggatgaatacgaactgctctacataggcgggggctcaatcctgtcaccgacaacggcagtgctggatggaatccgggaaatcgagcacatgggaaagatcgcgatcagcaatctgaaaaagggtatggatgcgctttgtaccttgaatgaggaagaaatcgatgcggtatatcacaaggaaaaatacatagactttatgaaccgcaagatcacggattatctggtcaaggtcaatgaaatcgaacttccgattgccgatgcaaggctgataggcggattgttccacgtggtcaatgatatcgagcgtattggcgaccatgcggagaactttgcagattcggcaaaaatgcggattgatgacggggtggagttcagcgacaaggcaataaagcagctgcaggacatgacggaaaaggtcattgagatcctggaatactcgctggatatgttcactaacaggaaccaggagcatatgcaggagatcctgaatctggaagacgagatcgatgacagggagaagaagctgcaacgcgcccacgttaagaggctgacgaagaataaatgcacgccggaagcgggaatgatattttcagataccatctccggactggaacgtgtggcggaccatgccaccaacatcgcatttgctatcctggagccggacgaaggcatggaagatgaggacgaggaataatttttgcctttacaagacaaagccgctgtgctatactaaccaagtatgaatagccggtgttcggtaaatggaatctccaaccattgcttaatatcaggcgtttaataaagaattataggaggaaatgacaatgatttcaaaagagcagaaagaacagattgtaaaagatttcggaaggacacctggagatacaggctcaccggaagttcagattgcgattctgacagcaagaatcaatgatctgacagatcacttcaagagcaatccgaaggatcatcattcaagaagaggtcttctgaagatggttggacagagaagaggtcttctggcatatcttaagaagtctgatatcgcaagatatcgtgcactgattgaaaaacttggattaagaaaataatttcaggcagtgataggaaggggcgttcaaaagaacgcctcttttaatttaatagtggcacatttttatcatatatgttataatatttaagactgtgggcggggaaattacacccgagaccactgaaaagcatatttgtcctggcagatggccggataagtatatttttcagtagtttcggtgttcctctcccaggtaatttcaagaattaaaggagaacactatgtataagaaatttgagatggaacttgcaggcaggactctgcgcgtagatgtggacagagttgccaagcaggcaaatggagcggtactgatgcattacggtgacaccaccgtgttatgcacggcaacggcttccgagaagccgagagagggaattgattttttcccgctaagcgttgaatacaatgagagattatactctgtaggaaagattcctggaggattcaataagagagaaggaaaggcatctgagaatgcaatccttacctgccgtgtcattgatcgtccgatgaggcctttattcccgaaggactaccgcaatgatgtgacgttagagaacctggtattatccgtagaccaggactgctctccggaacttacagcaatgctcggagcggcaattgccactaccatatccgatattccgtttgacggaccgatctctacgacacaggtaggcatggtggatgatgagttcgtatttaatccgactgcagcgcagaaggaaacatccgatcttgcgcttacggttgcctctacaaaagagaaggtgatcatgatcgaggctggcgccaatgaagtgccggagcagaagatgatcgacgcgatctttgctgcccacgaactgaaccagaaggtcatcgcgttcatcgagacgatcgtggcagagtgtggaaagccgaagcatgcatatgaaagctgcgcggttccggaagaactgtttgccgcaatcacggagattgttcctccgtcagagatggaagaagccgtatttacggatgacaagcagaccagagaagaaaatatccgcgtaatcacggcaaagctggaagaggcatttgcagacaaagaagaatggctgaatgtgcttggagaggctgtataccagtaccagaagaagacggtacgcaagatgatcttaaaggatcagaagcgtccggatggaagagccatcgaccagattaggccgcttgctgcagagattgacctgattccaagggttcacggctcagccatgtttacaagaggacagactcagatctgcaccatcaccaccctggcaccgcttgcagaagcccagaggctggatggcttggatgaggcagagacttctaagagatatatgcaccactataacttcccatcttactccgtaggagagacaaggccatcaagaggcccgggacgccgggagattggacatggagcattggcagagcgcgcactgataccggtacttccaaatgaggcagagttcccatatgcgatccgtaccgtatctgagacatttgaatccaacggctctacctcccaggccagcatctgcgcatcctcaatgtccctgatggcagccggcgtgccgatcaaggctgcagtggcagggatctcagcaggactggtgacgggtgattcagacgatgactatctggtactgacagacatccagggcctggaagacttctttggagacatggactttaaggtggctggaacccataagggaattacagccatccagatggatatcaagattcatggcctgacaaggccgatcattgaggaggcgattgcggcaacgaagaaagcaagaacctatatcctggatgaagtaatgtccaagaccatcgcagagccaagaccggaagtaggccagtatgctccgaagatcatccagatgcagatcgatccacagaagatcggcgatgtagtgggacagcgcggaaagactatcaatgcaatcatcgaccagaccggagttaaaatcgacattaccgatgacggagccgtatctatctgcggaaccgatgctaacagcatggaagaggcaaagagactggttcagatcatcgtgaccgatttcgaggcaggccaggtactggaaggaaaggtcgtaagcatcaaggaattcggcgcatttcttgagttcgcgcctggaaaagaaggaatggtacacatttccaagatttctaaggaaagaatcaaccatgtagaagacgtgctgacattgggcgacgtggttaaggtcgtatgccttggcaaggacaaaatgggcagactgtcattcagcatgaaagacgtggcaaaataagaagtgaacacgcaacatttttaagttgggcacgtaacatttttaaaaaatgttacgtgcccaacttgcataactggtgtgtaaaattgaaaaatacccgtgtaaaaatgaaccaaatatgtttctttagtaggtgactttcctaaagttatcctgttagattaaccagtctggtttggctgcttactccggggccgcttaagactacagatacggtgaggcttatacggttgtcctgaacaatcaacacatgtctcatacaaagtccgaatccattcttttatagcttatttaaaaagcaacttccaccgtaagccaatataataacgctcgcattatccaagaattaccaacagattgcagccggcccgcttgcatcctccaatccccaaaattctactgaaaccccacatctatcacgcagatctcgctcttagtccccactctcatattaggcccgaatacgcccactccggaggtgacgatattgtgcatctgatcttttttcagatagccgcaaggattctcccagagcagcttaatcgttagattgccaggaaacatctggccatcatgggtgtgcccgcacagatctatgtctacgcccgcatcggcaagttcctgcagttgatccggctcatggtcgatgacaaggataggcttgtccgtatccatctccttggtcagctccttggggcttaagcgcttggagatgccccgtccgggacgctccctgtcggccctgccgaagagatagaaagagtcgtcgatcagaaccccttcatcgtgcagaaactggatattggcatccttaaggaactgatccattctgggatcactcatttttttcttgtcgtggctgaaggtgaagccggccagaatcttttcctggatatcgtgattgccgtagcaggcatatacgccgtagttgcttttaataccacgcagcgtgcgggcgatcttatctggatttttcaaagcatcgtaattattgtcgaagatgtcccccgcgattaccaccagatccggatcctgggcattgatcttcctgaccatctgggacatctgcgcatttcccacgctgtagcccaggtggagatccgctaccaggacgactttcatggaatccagatctttgcaagatttcttaatggttacggaataatctgtggtatgtatttggcgggcatttagatatccatagacggaaagggagaggatcaaggaaatgcagagggtgccgctggcgacgaagagcctccgggattccttccattcccgcttcttcatgcgcttgacgatcagttttgcgatcaggcgtatgccatctgcaaccaggatggtaagcaggatatagcagagggtgccaaaccagatatttgaaatgtagatcagccatctggcaggccagaagaaggccagcaggatggataaggccaaaaagccgtagacggccagaacgatcagcctgacccaagtcttttggaaatgatgcgtgcaggctcccataaagcggatcagccagcggaagatataagcatttaatattaggtagacaggcgcaagaaatacagcgatcatagcaaattcatcctttccgtagaaatcagatacttgaatatacggattgtaacatatttgggaataaattaaaagtcgtctcatatattggtgtaaagaggtggacaaatatgcaggagaacagaatcttaaatgtcttgccgcgcagcgtacgcattctgatccataaggagcagctgcagtacgagcacctgcaggagatcaagctgcgggtggaaaagccgctgcttctgatctacagaggagaagaactgatcctgggagggcagcgcggcaagccttatatggttacaaaagaagatgtaagggagatgctggaatatatcagcaattattccttatatgcatacgaacaggaaatgaagcagggatttatcacgattgaaggaggacacagagtaggaatgacaggacaggcaattatagagaacggcaaagtaaagaacctgaagcatatctcatccgtcaatgtgcggatgtcccatgaagtacttggttgtgcagataaagtatttccctatattacctataacagaagcctataccatacgctggtcatatcgccgccaagatgcggcaagacaacgcttcttcgggatatgatccgtcagatctccgatggaaatgactgggtgaggggcatggctgtgggggtggtggacgaaaggtcggagattggaggctgctatatgggggtcgcccagaaccatctcggaatccgcacggacgtgctggatgggtgccccaaggcagaaggcatgatcatgctgatacgctccatgggaccggaagtcattgccgtagatgagattggatcggcagaagatgtacatgccatcgaatacgcaatgcactgcggctgcaagatgctggccactgtccatgcaggttccatggaagaattaagaaagaagcctctccttgaccagatgatcgaccagggacgctttgaacggtacattcttttgggaaaccgcgcgcacgtggggcagatcgatggcatcttcgatcaccggggcagccttctgtacagggaagatgtcagatgacggcaatggtaaagaccttcggggctgtcctgatcataggagccacctctttatggggcatccgggcggcagaccgtatcaacgaccagtatgtccagatgcagtatctcaagaagctgatctaccagttaagaagcgagatacggtatgccaggtcttatctgggggaagcgtttcgtcacattgggacatcttccagggagccgtataaaggatggattctggaaatatacgacaggctggagcataagaacaggggaacgctggcggatatatgggaagatacggtaagagaatatctgggggcatcaggccttccggatgaggaactggacaaactgataaatcttggaggccagctgggggtcgcggatattgagatgcaggtaaagactctcgacctctacctggaggaaatgagcctttccatggaagagatgcggggcgggatgaaggcaaaggtgagattatgccactgcctgggtgtgatgagcgggatatttattaccgtcctgttaatatagaggaggcgtgcatgagtgtaaatctaatatttaaaatagctgcggtgggaatcctggtctccgtcttaagccaggtcttaaagcacagcggaagggaagagcaggcgttccttacaagccttgcggggcttctgctggtgctgttctggatcgtgccatacatctatgacctgtttgaatccatccagcatttattttcgctgtagaaagaaggaatgcccatgaatatgatacagatcgggatcatcggggtcgccggcaccctgctggccgtacagtttaaaagcggaaagtctgagtatggcatctatatcagcgtggcactcagcctggtcatcttctttgccattatcggccggctggaagtgatcatcgatgccttgagaaccatcgccaattatatcaatatggataccgcctatatcgggacgctgataaagatgctggggattacctatgtggccgaattttccgcgggcatctgcaaggacgcgggctatcagaccatcgcgctgcagatagagatattcggcaagctggcggttctggtattgagcatgccggttctgatggcgcttttaaataccataaaggactttctgtcatgaggcggcgaaaaatggtacaggcagccatcctgtgggttatcctgctcctaatattttccccgctgccggcacaggccaaagaggccaggcagtcgggaactaatgaggataaggcagagagttccgggatgcaggaggatttgatcggggagttcgattttggggagattgacgattccttaaaggaactctttccggaagagaagctggactttaaggaaacgcttatgggagtcatttccggggatctgacattttccgcccagctgctgaaccggctggtatcggatcagctgggatatgcgtttagaagctgcaaggacaatctggtacatatccttctgatcgcggtcattgcggccgtattcagcaatttttcaaacgtattccagagccgccagatatcggaaatcagtttttacgccctgtatcttcttctgatcgcattggcattaagttcattccaggtggtggtggagtgggtaggccaggggatagacagcctgacctcattcatgggcgtattctgccccttatatttcctggcagtggcaattgcaaaaggcagcgttacttccattgcgttttataatctggtgctgtttttaatctttcttgtagaacttctgatcaccagcttccttctgcccgtgatccatatctatatgatggtacgggtgctgaattacctttcctctgaggaatatctaagcaagtttgcggaactgatacaggtttcagtgtcgtggatattaaagacgctgctggcctgcatcatcgggctgaacgtgatccagggaatgataagcccggccattgattctgtgaaaagaagcgccatcgccagaggcgcggaagctatccctggcatcggggatgccataggcggcgtggcggaggtggctcttggcacggcggtgctggtgaagaatggaatcgggatgacaggggctctcatctgcatcgccctgtgcgtggtgccgctggctcagattgcctgcatcgcctttttatataagctggcggcggcaatcatacagccggtatccgacaagcgtatcgtaggctgtgttgagacagtgggagacggatgccagcttcttatgcgggtggtatttactacgggccttctgttccttctgaccattgccattgtatctgcagtaaccagtaatgtctgaggtgtggctatgtttgaatatttatatgaatggatgaagaatattgcgttttatatggtgcttattacggcggtcatccatatccttccgaattcggattataaaaagtatattcggttctttaccggaatggtgctggtcgtcatgcttgccacgcctttacttaagatattcggcatggagcatccgctggggagtctgtatgacagcaaagagtatcaggagcagatgaaaaagatagaggaagaatccaagtatcttggcgagacgctgccagaaggctatccggacgatgccgggcaggaaccggaagatgaggaaaccgggatagaggtggaggagatagagattggacgttaagaaaaagaaacgatttgaaattccgaagaatttttcgattaaaaagttaaaaaaggaccagctgctgattctgcttctggtgggaatattgctggtcgtaatcgccattcccacagggaaggggaaggatgctgcttccaaagatgcagggagcagcacggcggcagagggaggaggagaggcggcgtatggcaattacgcttcttatatggaagggcaccttgagggcgtgctgtcacagatggccggggtcggggatgtgaccgtcatgataactttaaaatcctcagccgagaaagtggtggagaaggatgtggaggcacaaagcgagacggttacggagtcagacagccagggagggacgcgcacgacccagaacagcagccatggagagtccaccgtatatgacggagatggatcccaggggcaggcgccttatatcagcaaggaactgagccctcaggtagaaggagtggtagtcatagcctccggaggagataatgcagtggtaaaacagaatattactgaagcagttcaagcattatttgggatagacacgcataagattaggataatgaagaagaattcataaacgatgtggcaaggtaggaggatgaacagtgaaacgaatctttaaaaagaaccagattattattgcagcattggccgtaatgattgcggcggcaggatatctgaattactccggaaaattattcggggataaggatacggcagaaaagacgaatgcagaacttgcaaataaggaacttctggacatatctgaggaggatgtgacgacaagcgcgtccgatgatatcaagagccaggacggcaccgacagcgacggaagcgtggacgggacgccgggagaggctgtactaacaagcggcgaggcaagcgccgtggttgcagaagcaaaggtgaccagggaacaagtaagagccaagaacaaagagtccctgatggaaatcatcgacaacgagaacttaagcgatgagcagaaacaggacgcggtgaaccagatggtggcaatgacggatattgcggaaaaagaagctgcagccgagacacttctggcatccaaaggcttcagcgaggccgtagtaagcctgacccaggatgcggcagacgtagtcgtgaatgcggcagaattaagcgatgccaaccgggcgcagatcgaagacatcattacccgtaagactggcgtggcggcacaaaacatcgtgattacgccggtgtattccgaagggaagtaggggggattggcgacccgcccgcgaggctggggcggtgattcctgcgacgctttggcgcctgcatctcttgcactgatctgtaagcccgcgaaagagtcgccgatagcggcttatcacccgcagactatacataaaactacataaaccagtttgcaggccagtctaataggaggcaattatgcttcttatataggctggcttttatctgttccggcgaacggcgtatcctaaagcccgcgcccatccgtccgccgcgcgttacacgccaatcacctgtcccctaataaacaaaattcctaattgaggattgattccaggtgtgttatactgtctaatagcgtctatatgcggatatactatttgtaggagtgtttgaatctatgtcacagataaataatcaagtaaaagagcagataaaaaagagaaggacctttgccatcatctcccacccggatgccggcaagactacgcttacggagaagttcctcctgtacgggggagccatcaaccaggcgggaagcgtcaagggaaaggccacggctaagcatgcggtgtccgactggatggagattgagaaggaaagaggtatctcggtcacctcctcagtccttcagtttaattttgacggctactgcatcaacatcctggatacgccgggccatcaggatttctcggaggatacgtaccgtacgctgatggcggcggactccgcggtgatggtaatcgatgcgtccaagggcgtggaggcgcagaccaggaaacttttcaaggtatgtaccatgcgccacatcccgatctttacctttatcaataagatggacagggaggcaatggatacctttgaacttctggatgatatcgagaatgaactgggaatcgccacctgcccgataaactggccgatcggctcaggcaaggaattcaaaggggtctatgacagggagacgaagaaggtagaactgttttctgacacccgcaagggcactacccagggagaggtgaagaaggtagatatcgccgatccggagatcgcatggcttatcagagactcccagagagtgcagctggaagaggaaatcgaacttcaggatggagccggggctcagtttgaccaggaactggtgagcaagggcgaactctcgccggtattctttggctcagcccttacgaacttcggtgtggaaacgtttctaaaacatttccttaagatgacctcgtccccgcttccaagaaaatctgacaggggcctgatcgatcccatggaagagggtgacttttctgccttcgtgttcaagattcaggccaacatgaataaggctcaccgggaccggatcgccttcatgcgcatctgttccggcgaattcgaggcaggcatggatgtcttccatatacagggcggcaagaaggtgcgcctgtcgcagccgcagcagatgatggcaagcgagaggaagatgatagagaaagcctatgggggagacattatcggagtctttgatccgggtatcttctcgatcggagatacccttaccaatgccggtgataaattcgtctacgaaggcatccctacattcgcgccggagcattttgcaagagtgcgccaggtagacacgatgaagcggaagcagttcattaaaggaatcaaccagattgcccaggaaggcgcgatccagatcttccaggaatacaacactggaatggaagagatcatcgtgggcgtcgtgggcgtcctgcagtttgacgtgctcaaatacaggctggaaaacgagtataatgtggagatacgcatggacactcttccatacgagcatatccgctggatcgagaatacggagattgacctggataaactgacaggcacatccgacatgaagaaggtgaaagacttgaagggccgtccgctgcttctgttcatcaatgaatggagcatccgcatgaccatagagcgcaacgatgggcttgagttatccgaattcggcagataagactttgcaaacgtaggtaaatttgatataattactagaagtgtaaaaccagacaggaggttcaggtaatgagtagagaagaaagaaatacgtatacaataaagggcgatgagaatctcggcgaggtgaagattgcggacgaagtagtggcgattattgcaggccttgctgctatggaagtggacggcgtctcttccatggcgggaaacgcgacaagggaactgattggcaaactgggcatgaagtctttgtccaaaggcgttaaagttgatgtgctggatgggatcgtgacggtatccctggcactgaatctgaagtatggctacagtatcaaagagattactacgaaggtgcaggagaaggttaaggcggcaatcgagaatatgacaggcctcgatgttgccgatgtgaatatccgaatcgccggagtagacgtgccggaggaagcataagtgaagaggacagagcaaagagagcacatcttcaagatgctgttcggagtggaattcaacgctggcggggatatgccggagcagctggaactctacttcggccagctggagggtgcgggtgaaaaggaccttgactatatcagggaaaaggtacagaagatcgcgtcgaaggtagaagagattgacgcgctgattaacgagcatacgaccaggtggaagacgagccggatgaacaaggtggatctgacgattctgaggctggcagtatatgagatgagatgggacgaggatgttcctacaggcgtggccatcgacgaggctgtggaacttgcgaagaagtacagcagcgaggacggtccctcctttgtcaatggcgtgcttgcaaaacttgtagattaatcagaggtaggttatgactcggaatgtatatacggttaaacaggtgaatgcctacattaagaatatgtttacccaggactacatgctgaaccgcatttacgtcaagggcgaggtttctaattgtaagtatcacacatcgggacatatatatttttcattaaaagatgagtccggaacgattgcctgcgtcatgtttgccgggcagcgaggcggactctcttttcgtatgagcgagggccagcagatcgtggtcctgggctctgtaaatgtgtatgagcgaagcggctcctaccagttgtacgccaaagagatacggctggatggagatggacttctctatgagagattccagatgctgaaaaaagaactggaagagatggggatgtttgcgccggaatacaaaaagccgatcccatcctttgcaagcagaatcggcgttgtcaccgcgcccaccggagcggcggtgagggacatcatgaatatcgccggacgccgcaatccctatgtccagctgatcctttatcctgcccaggtgcagggggaaggcgcgaaggagagcatcgtgcgtggaatccggatgctggaagcatacggagtagatgtgatgatcgtggggcgcggaggcggttccattgaagacctgtgggcctttaacgaagaagaagtggcccgggcgattttcgaatgcagcgttccggtaatctcagcggtgggacatgagacggataccaccattgccgattacgcagccgaccttcgggcgcctacgccgtcggcagccgcggaactggccgtctatgattaccggcaggtgcagatgggtatgcaggagtaccgcttgcggatgaaccggctgctgaatcagaagatacaggtatcccgcctgaaactgcgggaataccacacccgcctgaaatatcttcatccccggctcaaactgcaggaacagcagcagaggctatctgagatggaagacaggatgaagatgctgatggaggggaaggtaagggatgcgaggcataggatggcgttatacgtggaagtgatgaaggggctgtcgccgcttcagaaactcagccacggatacgcttacgtggaaggaagagacaagaaggccatcaagagtatcaggcaggtccggaatcaggacaggctgtccatatatgtgacggatgggatcctacaggcaactgtggaggatgtgaaggaggagcagcatggataaggacaaaaagattcaggagaatgcaaccctggaagaactgtttgtacagttggaagatgcgatccgcaagatggagaaggaagacatctccctggaagattctttcagcctgtaccacaagggaatggatatgctgaagctgtgcaatgaaaagatagataaggtagagaagaaaatgctggtattagatgaagagggagatgcacatgaattctaaatatacattatcgaatgatggcaatacaggatgcgcgaatgggtattgtatgcaggcacagatgaagcataaggtggaaaagattgaaggaatccttacggagtacctgcccaggcaagaaggattccagagcatcatcatggaggctatgaactacagccttctggccggaggaaagcgcctgcgtccgatgcttatgaatgagacttacaggctgtttggcggggaaggcccgctgatccgcccattcatggcagccatcgagatgattcatacatactccctggtccatgatgacctgccggcaatggataatgacgagtatcgccgcggacgtaagaccacccatatcgtatatggggaagacatgggaatcctggcaggcgacgcgctgcttaactatgcctttgagacggctttcaaggcgtttgtcatggagccggaagagagccttctcatcggaagggcgttgggagtgctgggggaaaaggccggcatctacggaatgattgggggacaagtcattgacgtcaaagagaccgggcattccataccgaaggaagtactggatacgatctatgaattaaagacttccgcgctgatcgaggcatccatgatggtcggggcaattcttggaggcgcttccgaggaggaagtaaagatcatagaaaagattgcaagatatgtaggaatcgcgttccagatccaggatgatatcctggatgtgaccagcaccaaggaggtgcttggcaagccgacccacagcgatgaaaagaacgagaagactacgtatgtcaccttgatggggactgctgaggcagggagaatggtagaagaactatcagatcaggcagtaagcctcctgcatcagttatcagaagaaaacgaattcctggaacagctgctgctccagttgattcacagggagaaatagcggggtaactgattatgttagagcgtatacagaaggaaaatgatattaaggaactgaacctggaagaactggaggaactggctttggagatccgggaattcctggtcgagaagatcagcaagaccggcgggcatcttgcgtccaatctgggcgtggtggaacttaccatggccatgcatctgatgttccatcttccggaagataagatcatctgggacgtgggtcatcaggcttatacccataaactgctgaccggcaggaaggcaggctttgacgaacttcgcaaatatggcgggatgagtggatttccaaagcgtaaggagagtgcctgtgatgcgtttgatacaggccacagttcgacttccatctccgccggtcttggatatgtgcaggccagagatttgaaaggagaagactacagcgtcgtttccgtaatcggggacggttctctaaccggaggcatggcctatgaagcccttaataatgcttcttctcttaagacgaattttattatcgtattgaacgataaccatatgtctatctcagagaatgtaggaggcatgtctaagtatctggcagaacttcgcacggcggacatatatacaggactgaaaaaaggcgttaccaatgcgctggagaaggttcccttagtaggagattccttgatcgagcacatccgcaggaccaaaagcagcatcaagcagctggtggttccgggaatgttctttgaggatatgggaattacttatctgggacctgtgccggggcataatatcgggcttctttgcaaggcatttaaagaagccaggaagatcaatggtcctgtgctgctgcatgtgatgacaaaaaagggaaaaggctatgagcctgcggaacttaagccggataaattccacggcgtaggtccgttccaggtggagacaggcgaactggaaacgccaaaagacaaggatacttatacggatgtattcggcaaagtcctgtgcgatgaggcgggaaggaatcctgatgttgtagccattaccgcagccatggcagacgggacggggcttaccagattccggcagatgtacccgaaccggttttttgacgtgggaatcgccgaagagcacggggtgaccttcgcggcaggcctttcggcaggagggatgaagccggtgtttgcggtatattcttccttccttcagagggcctatgaccagctgatccatgatgtggcacttcagaatcttccggtcgtgcttgcaatagaccgggcaggcctggtaggaagcgacggagagacccatcaaggaatctttgacctgtcttatctgagcagcataccgaatatggtcgttatgactccgaagcataaatgggaattggcggatatgctgcgctttgccctgtcttatgatgggcctgtggcgatccgctatccaagagggagcgcgttcgatgcgtacaggcaattccgcgcgccggtcgtatacggcaaaagcgagatgctctatgaagaaaaggatatcgcgatcctgagcgttggccacatgtttgaaagcgcccttcaggcgagagagcgcctaaaggagagcggatacagctgcactctcgtcaatgccagatttgtaaagcctatagatgaagcgataatcgcgtccttgtgccggaatcaccggctgatcgtgacggtggaagaaaacgtgcagaccggcggatacggcgagcatgtgctggaatatgcgtgcaggaaggatctgggcgtgaaagtactgacgctggctttgccggatgactatgtagagcatgggaatatcggcgtgctgcgtaaggagaccggaatcgacgtggaatccattataagaagaataaaggacgcttatggcaaattataggagttaatatgaaagaacgtttggatatattactggtaaaaagaaaccttgccgcttcccgggagaaggccaaggcaatcataatgtcgggcagcgtctttgttgacgggcagagagaggacaaggccggggccacatttccggagaaggctgcaatcgaggtgaggggacatacgcttccttatgtaagccgcggagggctgaaattggaaaaggcgcttcggaacttcgatgtgacggtggatggaaaggtgtgcaccgacgttggctcatccacagggggatttacagactgcatgctccagaatggggccaggaaggtctatgccattgatgtgggaagaggccagctggactggaaattaaggcaggatgagcgggtcgtctgtatggaaaagaccaacatccggtatgtgacgccggaagacatcggagagccggtagatttttcttccatcgacgtctcctttatctcgcttacgaaagtgctgctgccgattcataattatctgaaagataagggccagatcgtggcgctcatcaagccgcagttcgaggcaggcagggaaaaagtcggcaagaaaggcgtagtacgggataagcgcacgcatatggaagtcatcgctatggtaattcaatatgccttatccataggattttccatcctgaatctggagttttcgccaatcaaaggaccagaaggcaatatcgaatatctgatccatctggaaaaatgcggggaggatgccaggatagcagaaggaatcgaagaagaaaagacggtggaagaggcattttgcacgctggcaaaaaattaaaaggaatgcaggacaatatggacaggtttttaatcgttaccaatgacggcaaagatgtagatcacatcattaccaggaaggtaaaggggcttctggagacagaaggaaagaaatgcgtcttatgccagaaggatgaaaagaagaatatcataaaagaatccataccggaggatatagaatgcgccatcgttatcggcggagacggaagcctgatcgaagtggcaaggcttttgtgggagagggatgtgcctattctgggaatcaatatgggaacccttggctatcttacagaggtggaagtcggcaatatcgaggaagccatcggccagatcgtaagcaatgactatacatttgaggaccggatgatgctggaaggaatctttgaggacggttccaaggacgtgtctctgaatgatatcgtgatttccaggaaaggagaacttcgggtcattcatttccagctgtatgtgaatggggaactgctcaattcctatgaggcagatggcattatcatctccacgcccaccggatccacggcttataatctgtcggcaggcgggccgatcgtggagcctacggcatccttgatcgtgattacccccatctgttcccatgcgctgaatacaagcagcatcgtcctgtcttcggatgatgagattgggatcgagattggcatggggcgccatgagtctaaggaggaagtattcaccacctttgacggcgcggatacggtggtactgaccacgggcgataaagtaacggtgcgcagatctgaggcttccaccaagattatgaagttaagcaaagtcagctttttagaaacgctacgtagaaagatgaaaggaaattaacatcatgaaagtaaacagacacgcaaagattattgaactgatcaataagcaccacatcgagacgcaggaagaactggctgaatacctgaaccaggaagggttcaaggtaacccaggccaccgtgtccagggatatccgggacttaaagcttacaaaagtcccttatgagaacgggaagcagcgctatgcggtgcatcagagcgcagagaacggcatgagcgagaagtatatccgggtgttaagggatggctatgtctctatggatatggcacagaacattctggtcatcaagacggtagcgggaatggcaatggcagtctgcgcggcgatcgatgccatgcagtggaatgaagtagtgggaagcatcgcgggcgatgatacgattatgtgtgccatccgaagcgtggacgatacggtaaaggtaatggataagattagcaagattgtcttgtaggaggcagtatgttacagaatttacatgtgaagaatctggcattaatcgacgagatcgaggtggaattcaaggatgggcttaacatcctgaccggggagaccggggcgggtaagtccattatcctgggttctataagccttgcccttggcggacgctataccaaggatatcctgcgccagggcgcggagtatggattcgtggaactgacatttctggtggaaaatgaaagccagcagaagaaattaaaagaaatggatatctatccggaagaaggaatggttacgctctcaaggcggctgatggccggaagaagcgtaagcaggatcaatggagagacggtgcagatggggcttcttaaggaggtgtcatctattttgattgatattcatgggcagcatgagcatcagtctctgctgtacaagaagaatcatcttggcatcgtggacgcatttgcaagggaatatctggcagaagacaagaaaaaggcggcacaggcttacaaagcatacaaagcctgcgaaaaagaactgaaagaggccatggcggatgaatcccagcgggtcaaggaattatccttcttaaagtttgaggtgtccgagattcaggaagctcatctgcttcccggggaggatgaggaactggaatccctgtatcgccggatgacgaacagcaagaagatcgcggacagcgtaaacgaggcgtatctttataccagcgagggaggcggcaatgcaagcgaggccttaagccgcgccatccgcgcgttatccgaggcatccgaatatgatgacagggccgcgcagctttatgaccagctggtggaagtggacagcctgttgaacgacttcaaccgggaacttgcggattacagcaagacctgcgaattttccgatgaagaattctatgagacggaaaaccgtctgaatgaaatcaaccatcttaagacaaaatatggagatacagtggaaaaaatactggattattgtgccagccaggaagaacggatcgggatactggaagattacgacaattatatcctgcggctgaaagaccaatgtgccaaggccgaagaggcgctaaggcagtcaacagccaggcttacgaagattcgaaagaagcaggccaagatactggaacaggcgattgaagaggggctgaaagacctgaattttgaaaatgtgaagttccggatacagtttgaatccacgaaggactatacggctgaaggcatggatgatatcgaattcatgatctctttgaatccgggtcagccggtgaagccgctggcaggcgtggcaagcggaggagaactgtcgcgaatcatgctggccatcaaggcggtgatggcaaagcgggatgaaatcgagacgctgatctttgatgagattgatgtagggatcagcggcaggaccgcgcagaaagtctcggaaaagatggcgtttatcggaacgaagcatcaggtcatctgtattacgcaccttgcccagatcgctgccatggcagaccatcactacatgatcgagaagtcgacgaagaaaggcgacacaaagaccagcatagaactgctggatgagaagcgttccatcgaggaactggcaaggatactgggcggcgcaagaattacggatacagtggtacaaagcgccgtggagatgaaggaacttgcgaaacagacaaaataaaccagagtaatttataaagaattgccacataataagatagatacccgagaatgggtatctatctttttcttggaggttttgaagcatgaggaaatactggtaccggagaatcttgatcatgatcgttacatttacggttgcagtgggaggaggctactacctgattgaagccaagcacagccagctgcgacaggaagtaagcgccgggacatcatccagaaatatggtgatcccaggaggcatgcccatcggcatatatttggagactcagggcgtcatggtgcttggcacggacgcggtgacagccatggacggcatggagtatgagcctgcctcccacctggttaaggcaggggattacatcgtgggcctggatgaggaagaaatcagcagcaagtcgcaattagtggatgcaatgaagaagattgacaaagatgaagtggtactcaaggtgcgccgctcagaggatctgatcgacatcaagctaaagccggtcagatgcagttccaaagattacaagttgggcatatgggtcagggacaatgcccagggacttggcaccattacattcctgaatgcggacagccagttcggggcgctgggacatgggattcatgatgtggataccaatacgctgctggagattaacgacggcaccgtgtacgagaccagcatcaaagatatccagaaaggcgtaaacggcacgccgggagggatggaaggaatcatagtctataacaattataatgtgcttggaagcataaccaagaatacggactgcggcatcttcggaaagatcgaccgcattgacgcactgtttacagaccagacgcctatggagacggcatccacagacgagatcgaggaagggcctgcgacaattcgttgcgccgttgaaggagaagtgaaggattatgagattcatattacaaaagtcgacaagcatacagatgagctcaataaagggctcgtcatagaagtcacggacaagaaactccttgaagttacaggcggaatcgtacaaggcatgagcggaagcccaatcatgcagaatgggaaaatcgtgggcgcggttacgcatgttttcgtccaggactctacgaagggatatggcatttttattgaaaatatgttgaaaaatgtcactttgtcataaatttgtcgattcgggtcaagtttttacgacagcaatttcttgctttgcaatatgtcaaattatataatttaaatcgacggttttcatgtaaggaagggaggcaatacgtaaaaatgggagagataaacgtagcaatagccgacgacaatgagagaattctagatttgcttggcgaaattatcagcagcgataaagaattaaatctggtcggaaaggcgaacaatggagaggatgcgtaccatctgataaaagaaaagcagccggatgtcgtactgctggatctgattatgccgaagatggacggattaagcgtgatggaaatggtaggaggtgataaagacttgaagaaacagccggactttattgtcgtcacggcagtcgggcaggagcggatcacggaagatgcgttcaggaaaggcgccagctattacatcatgaagccattcaacaacgagatggtcttgaaccggattaagaacgccaatcacctgatacgccatgagatgaagacgcaatccgcccaggggcttaagatggaagaagcgcccgaggtgaatctggagaaccgggtgacggatatgatccacgagattggcattccggcgcacattaagggataccactatctaagggatgccattatcatggcagtggaggacatggatgtgcttaatgcgatcacgaaggtactctatcctacggtggcaaagatgcatcagactacggcaagcagggtagagcgggccatcaggcatgccattgaggtggcctggagccgtgggaagctggataccctggatgacctgtttggctacacggtcagcaatggcaaaggaaagccgacgaattcggagtttatcgcattgattgcagatacgatcagattggaatataaaaacagataatacttttcttcttaaaaaaaatacgctataataggtgtatattgaagggttgggaggaaaagcaatgaaaaaaatactttttgcggcttcggaggcggttccgtttataaagacaggaggacttgccgacgttgttggttctttaccaaaatatttcgacaaagaaaaatatgatgtacgggttatgctgcctaagtacatgtgcatgaaggaagaatggaaagaaaaactgagttaccatacgcatttttatatggatttaaattggagaaaacaatacgtaggaattttggaattagagtacgatggaattacgttctattttatagataatgaatactattttaatggatttgcgccatatggcgatatgtacgcggatatcgagaagttcgcgttcttctcaaaagcggttttgagcgccctcccggtaatcggctttcggccggacatcattcactgccatgactggcaggcaggactaataccggtatatctggataatttccgctatggggatgagtattaccgggggatcaagacgatcatgaccatacataacctgaagttccaggggacatgggataccaagagggtaagagatattacgggacttccgcagtattattttgcgcctgacaagctggaagcgtacaaggatgccaattacctgaagggcggcatcgtgtatgcggaccggatcaccacggtgagcaactcctatgcagaagagataaagactccgttctacggggagaaactggagggccttatgaatgcccgctcgaactgcctgtccggcattgtgaacggaattgactatgaagattacgaccctgccacggatacccacatcgagaaaaactatacatgtgacagtttccggagggagaagataaagaataagatcgcgcttcaaaaggaattgaacctggagcaggatcatcacattataatgcttggaatcgtgtccaggctcacggatcagaaggggtttgacctgatcgcctatgtgatggatgaactttgccaggatgcagttcagatcgtggcgcttggaacaggagatgaaaagtacgaaaatatgttccggcattttgcatggaaatatccgggcaaggtatcggcgaatatctattattcagaggctttgtcccataagatatacgcttcctgcgacgcattcctgatgccgtctctgttcgagccttgcggcttaagccagttgatgagccttcgttacggcaccgtgccgatcgtcagggagaccggcgggctcaaggatacggtagagccatacaatgaatatgaaaagaccggcacaggattcagtttcatgaactataatgcccatgagatgctggcaacgatccgctatgcggagcgcatttactatgataagaagcgtgactggaacaagattgtggaacgcggcatgaatcaggatttctcatggaagaattccgcaaagcaatatgaggaattatacgatggcatttaagaagtatgggattagaaagatacgaaaagaggagcattgacatgaagataagagatatactgaaagataactctccccatgtatccttcgaggtatttccgcctaagacggatgccggctatgaaggagtgagagcggcaacggagaagatcgcggcgcttaggccctctttcataagcgtgacttatggagcgggcggaggcaccagcagaaatacggttaggattgcctcgcagatcaagaacgaccttggcgttacaagcctggcccatcttacctgcgtatcgtccaccaaggatgaggtgcacggggtgatcgggcagttaaaagagcagggcattgagaatattctggcacttaggggcgatattccggcggacggggagttccctctgccaaaccattacagatacgcctgcgagctggtagaggatattaagagccggggggatttctgcattggagcggcatgctatccggaaggacatgttgaggcggctcataagaaagacgatattatgaatctgaagcacaaggtggactgcggggtggatttcctcacgacacagatgtttttcgacaataatatcctgtataatttcttataccggatccgggaaaaagggatcacggttccggtgcttccaggcatcatgccggttaccagtgcaaagcagatgaagcgcatctgcgatctgtccggtaccgtcctgcctgagagattccgcgcgatcctggaccgcttcggggaggatccggatgcgatgaagcaggcagggatcatatatgccacggatcagataattgacctgatagcaaatgggttgaaccatatacatatttactccatgaataagccggaagtagcagaggcgatcatcggcaatctttctacaattataaaggcatagagggcaggaaaatggatgcaagggcgaaggaagcagttcgttacttgggatatggaaggcatgcggtagatgatcacacgcttgcgctggtggatagttccttcgtggaactggaagaggcggcgggcagaagaatcatctatcgcatttttgacttggatttccaggacgacggctgcatacagatcggacagatgaatattgaaagcaggaatctcgggaagaatatgaacggatgcgagaaggcgatcgttctgggggcaactttgggtgcccaggtggacatgctgatgcgaaaatatgccctggcagatatggcaagggtagtcacgctgcaggcctgcgccactacgatcctggaggaatatctggatgactggcagggaaagatggaagaagagatggcgggggaaggtctttatataaggcccaggttcagccccgggtatggcgacttctccatcgggcatcaggaagagattcttcggatgttggatgccgccaagaccatcgggcttacgatgacggcaggaggcatgctgacccccatgaagtctgtgacggcggtgatcggccttagcaggatcaaggcgccatgccatatcaagggatgcgaagcctgtgaaaagacagactgcatataccggagatattcatagacgagacaagaacagacagagaagataagagagcaaaaggagcagacagatgatattagaacgactgggaaaagaactactatattttgacggaggaatgggcaccctgcttcagtctaagggtctgaagcccggcgagcttccggaagtatggaatatcgagcacgcggacgaggtggtggatatccaccgtcagtattttgaagccggaagcgatatcgtgctggccaatacgtttggcgccaacgcattgaagttccacgatgcctcctatgatttaaaagagattgtcaatgcggcgatcgaaaatgtcaagaaaggcgcttccctgggggcagacgctggcaggaggacttatacggcgctggatgtggggcccaccggaaaactgttaaagcccatgggagacttgggatttgaggatgcctatgaggccttccgggaagtaatgaagtatggggaagaggcgggagccgatctgatccatattgagactatgagcgatacctacgaggttaaggcggccgtgctggcagcgaaagaaactacggatcttcccgtatttgccacgatgatcttcgatgagaagggcaagcttctgaccggaggcgatgtgccatccgttgtcgccctgctggaaggccttcgggtggatgcgcttggaatcaattgtggaatggggccagagcagatgcttcccattctggaagagattcttgcctatacgtcccttcccgtcattgtcaagcccaatgcagggcttccgaagcaaaaggatggacaggtctattatgacgtggatccggatcagttcgcccagacgatggaaaagattgtccatatgggagcctgcgtcattggaggctgctgtgggacgacgcccgggcatatccgcgccatggtcgaaagaacgaaaggactgtccgttatccttccatcccacaaagatctgaccatcgtatcttcttacgggaaggcggtcatgctgggagagaagccggtcatcatcggagagcggatcaatcctaccgggaagaagaagttcaagcaggcgctaaaggatcatgatctggattatatcctgaaggaaggaatcacgcagcaggataagggcgcccacatattagacgtgaatgtggggctgccggatatcgacgaggctgccatgatgcaggaggtagtgacacagctccaaagcgtgaccagcctgccgctccagattgataccgttgacgcaaaggctatggaaactgccatgcggatctacaatggaaagcctatggtaaattccgtcaacgggaagaaggaatctatggatgaggtattcccgctgattcggaagtatggcggcgtagtgatcggccttaccattgacgaggatggtattccccagacagcagaaggcagagtcaaggtagcaggaaagatcattgaagaggccggaaagtacgggatagacaagaaggatatcgtgattgacgtgcttgccatgaccatcagttcggagccggaaggagcgaaagtgaccctggatgccttaaagggcgtcagggaggcttacggcgtccgcacggttctgggcgtatccaacatatcctttgggcttccgtaccggcctgcgatcaattccaacttttataccatggccatgcagaacgggctgagcgcggggatcatcaatccctcctcagaggatatgatgcgttcctactattccttcttggcgcttatgaactatgacagcaactgcgaggcttatatccgccagtatggaagccagcctgtacctcctgcggcatcctcaggttccaggatgacccttaaggaggccattgaaaagggtctcaaggaagaagcgcaccatgcgacgcggacgcttctaaaagagcaggagccgctttccattatcaaccagtatctgattccggccctggacgtcgtgggaaaaggattcgagaagggaaccatcttccttccgcaacttctgatgagcgcggatgcagccaagatcgcctttgcggtgttaaaagacgaactggcgaaaagcggcggggatatggagaaaaaggataagatcattctggccacagtcaagggagacatccatgatattggcaagaatatcgtgaaggtgctgctggaaaactatagttttgatgtgattgatctgggaaaggatgtcccccctaagacgatcgtggagacggccatcaaggaagaggtaagcctggtgggcttaagcgcccttatgaccaccactgtgaccagcatggaagagacgatccggctgctgcggaagcataagccggactgtaaagtcatggttggcggagccgtgctgaaccaggattatgcggatatgatcggagcggacttctatggcaaggacgccatgcagtctgtctattatgcccagcgctttttcgggcatgaatagccagaacaagatattcatgctgtaaaattttgtaagattgtatggaatcctgaacatgaaaacgtattgacatttttttgtcaattaattatagtattacctgaatctacgaaagtttaggagggagttcggcttatgatgagaggaatcgatacgaccgtcagaagattaagaagaagagtattcgaggaagtggcaaggcttggatttaaagccaacgctgacacgctgaatgacgatatggaagccattccatataagatggtaaatgaagagacacagaaatacagagagagcgtctaccgcgcccgtgcggtcgtgcgcgagcgtctccggcttgccatgggactatccctgcgcccggagaataagccagtacacctgaccgccggcgtggaggccagcaatatatccgacaaatattatgagcccccgcttatgcaggtaattccttctgcctgcgaggcctgcgaggaacgagggtacgaggtcagcaacatgtgcaagggctgcctcgcccatccctgtatagaggtctgccccaaagacgcgatttccatggtaggggggaaatcctacatagatcaggataaatgcatcaagtgcggaaagtgcaagtccgtctgtccctacgatgccatatcaaagaaagaacgtccctgtcagaaggcctgcggcgtaggagccatcgagtcggacaacatgggacgcgcccatatcaataatgacaaatgtgtttcctgtggaatgtgcatggtcagttgtccatttggagccatttctgacaagtcccaggtattccagctggcaagggcattgacggaaggggacaagatcgtggccgagatcgcgcctgcgttctacgggcaattcggggacaacatcacgccaaggaacttaaaggccgcccttcacgaactgggcttctgcgaagtgtatgaggtagcgctgggggcggacatcggggcgatagccgaggctcatcattatgtgaataaggttagtaccggagaacttccgttcctgcttacgtcctgctgcccatcctgggcaatgctggcgaaaaagcagttcccggatctgatcgaccaagtatcccaggagttgacgccgatggtagccactgcccggaccatcaaaaaggaacacccgaacgcgcgggtggtattcatcgggccatgcgcggccaagaaactggaggcaatgcgaagaagcgtccgaagcgacgtggacttcgtggtgaccttcgaagaactgcaggccatgttcgatgccaaggatatcgacctcaaagaatacgaggcagaatcctccttccatgatgccaccggagcaggaagaggatacgcggtggccgggggcgttgcagaggccattgaaaaatgcatcaacgaatactatcccggtgtggacgttaatatcgagcatgcggaagggcttgccgagtgtaagaagatcctggctcttgcaaaggcaggcaagatgaatggatgcctgatcgaaggcatgggatgcccgggcggctgtgtcgcgggagccggaaccaacctccaggtggcgaaggctcagaagaaggtaaaggaattcgtggccggctcatcgaagaaaataccgtccaaagaattagaagaaattgaattaaagtaagaataaagaagcaggcggagcgttgacaaaccgcctgcttctctttataattaaaacttagccataccgttgcattacaaggatatgaaccatatattgaattagaaagcaggaggaagttatgcagaaatacggagtaaatgaattaagaaagatgtttcttgaatttttcgagagcaagggacatctggcaatgaaaagtttttcgctggtgccccacaatgataagagtctgttgctgatcaactcaggcatggcgccgctgaagccatattttaccggacaagagattccgccgagcaagcgggtgaccacttgccagaagtgcatccgcaccggggacattgagaatgtaggaaagacggcccgtcatggcacgttttttgagatgcttgggaacttttcgttcggagattactttaagaaggagtctatccgctggacgtgggaattccttacggatgtcgtcggactggatccggacaggctctatccctccgtgtatctggatgatgatgaggcatgggagatctggaataaggacattggaatcccggccgagagaatcttccggttcggaaaggaagataatttctgggagcatggctcaggcccctgcggaccatgttccgaagtatactatgacagaggggaaaaatatggctgcggcagccctgactgtacggtgggctgcgaatgcgaccgttatatggagatctggaacaatgtctttacgcagttcgacaatgatggcaataacaattacacggaattggaacagaagaatatagataccggtatggggctggaacgtctggcctgtatcgtgcaggaagtagactccatgttcgacattgacaccatgaaagccttaagggatcatgtctgccgactggcccatgccgaatatggcagggatgaagagacggatgtctccctgcgtgtcatcaccgaccatatccgttccgtaacctttatgatctctgacggaatcatgccttccaacgagggccgtggatatgtgctaaggcgtctcctgaggcgtgcctgcaggcacggaaggctgcttgacattccgggagagttcttggttgaactggcacagaatgtgattgaaggctccaaggatggatatcccgaactggaagagaaaaaggaatttatcttcaaggtaattgccaaggaagaagagcagtttaacaagaccattgatcagggactgtccattctgtccgatatggtggcggagacagagaaaaagggggaaaagaccctggatggccagaatgcgttcaaactttatgatacctacggattcccgctggatctgacgaaggagatcttggaagagaagggaatgtctgtcgatgaaaaaggcttcaaagaagccatggaaatccagaggaagacagcccgcgaggcccgtgaagtcaccaactatatgggggcggacgtgacggtatacgagtccatcgatcctagcattaccacggaattcgtcggctatgacaatctttcttatgagtccgaagttacggtgctcgccacggatacggaactggtagacgcgctttcggatggcgagcggggaactatctttgtggagaagaccccgttctatgccaccagcggcggccaggaggcggataagggaatcatccgcaccgcggacggcgaattcatcgtggaggatgtggtaaagcttatgggcggcaaatttggccatatcggccatgtatcaaagggcatgataaaggttggagacaaagcagcgctggaagtggatacggataaccggatgctttctgccaataaccacagcgcgacccatcttcttcacaaggcgctgcgcatggtcctgggcaatcatgtagagcaggccggatcctccgtcaatgcggacaggctgcgttttgactttacgcatttttctgcccttacggaggaagaattaaagaaggtggaagcaatcgttaatgagcagatcatgaactgcctgaacgtaaaggttcagaacatgcccatcgaggaggcgaaaaagactggcgcggctgcgcttttcggagagaaatacggcagcatcgtccgcgtggtaagcatgggagacttttccatcgaattctgcggcggcacacatgtggcgaatacaggcgtcattactgccttcaagattctttccgagacaggtgtcgcagcaggcgttcgaaggattgaggcattgacatccaaaggacttttaaaatattatgacgaactggaagagaaacttcacgaggcagcgaaactgttaaaggccgccccggataaactgacagataagatttcccatcttcaggcggaaaataaagcgctccacagcgaggtggagagtttaaagagcaagcttgcccaggatgccatgggagatgtgatggaccaggtcgtagaggtcaaaggcgtcaaactccttgcgacaaaggtggaggatgtggacatgaatggcctgcgcgaccttggagaccagctgaagaaaaaactaggcgaaggcatcatcgtgatcgcgtcagcaaccgacggaaaagtaagcctgatggccacagctactaagggagccatcgacaagggagcccatgcaggaaaccttattaaggcaattgccggccttgtaggcggtggcggcggcggacgcccgaacatggcccaggctggcggcaagaatcctgcaggcatggatgaagcaatcgcgaaagccgcagaagttctggaaggccagctggcgtaatagtctgctccttgtcaggaaagttacaaaaataactatggttgacagcaaataggatttcacatatactatttacaaatgaatattgccagatgaagtagcgaggaagatttccgtatgttagcacacggaaaaccgatgaagcaatcagagaggctcctaaccgctctgagaaactttcaggtgccaatacccgctatggatgggactctggaaagagccttttcgataaggccaccgtagaagtaaaactttcaggtaaaaatacagagggtacaggaccattatatgcgtgtcttgtaccctctttttatctgaaaaaatattcaaaaaggaagcaaaggagataagagttatggaagaaaagaagggactgaagaagaatctgggcgttgcgactgccatggcgatcgtggttggctgcgtcatcggctccggcgtgttttttaagccgcaggccatctacacagctacaggaggggcgccgggactcggcatgattgcctggatcatcaccgggcttgcaagcattgcggcggcgcttaccttcgcggaggtggctatcatgattccaaagaccggaggaatggtggcgtatctggaagaaatctacaatccggtggtaggattcctggcaggatgggtacagaccatattgttctacccggccatgacgtctgccctggcagttgtatgcgcccagcaggcggcactgtttatcggcgatggcttcacggtgccccttgcgattggcattattatcctgatcatctttttaaatagcctgggctcaaaggtaggcggcagcgtgcagatcatctttaccgtctgcaaattgattcctttgattctgctgatgatattcggattcgtaaaaggtggcggggcgaacccgatctttacgccgatggtgggagacggacttagcccggcggttgtccttggacagctgatggttgccatcctgtttgcttttgaaggctggaccaatgtaggcgccattgccggggagatgaagaatccgggaagggatcttcccattgcaatcgttggcggcgtatccgtgatcatgggcgtctactttattatcaacatctcttacctctgggttcttccggcaaacgagctggcgggaatgacagcgcctgcttctgcagtagccctgaagatcttcggagatgtgggaggcaagatcgtttccgtcggcatcatgatatccgtgtttggcgcctgcaacggatttgtattatccggctccagagtggcatattccctggcggaggaaggcaatttccccttcagcaaatctctggcaaggctgaataaggcgcaggttccaaccaactccatcatcctggtaggaggaatcagctgcatttatgcaatcagcgggcagttcaacctgctgacggaccttgccgtattttccagctggaccttctatacgcttacctttgtcggcgttatgaaactgagaaaagaccgtcctgatgcggtcaggacttataaagtaccgctgtatccggtggtgccattgatcgcgatcgtaagcggaatctacgtgatcattaaccagatattcatgtccgggctgcagtcaacgctgctgtccgcaggcagtatcgcagtgacgctgatcggcctcccggtctatatggcagtcagcaaacggaagtcagtaaataatatcgtggaaaatgatgaaaaaatattgacgtagaggaaatatgtgctataatcttatgtagtgcaataaaaatacccgaacagtcgtatgatgcacaatataggactggagggaggttaggtgtgagactatgtcaaatgtaatcgttaaagagaacgagacgttagatagcgctttacgcagattcaaaagaaactgtgcgaaagctggcattcagcaggagattcgtaagagagaacattacgaaaagccaagcgtaagacgtaagaaaaaatctgaagctgctagaaaacgtaagtataactaatatgtgcaataaatagagtgttggacgattcaacactctatttttatgtaataggaaattgcgtttcctatcgttgcacgttttttctataaggagactattatgtggtggaacaaggtgatatttggatggagtgcttatcatgtggtgctttggtttctggtctatagcattatgggctggattgtggaatctatctatatgtcagtctgtaatcgcaagctgaccaacagaggatttgcaaaagggccttactgcccgatatatggagtaggggcgctgacggtattctttgtattacggccatacagccagaatcctttcacgctgttcgttctgggaatggtgctggctacggctatcgaatttctgaccgcattgatcatgaataagatattcggtgagatctggtgggattacaaggagaagccgtgcaattataaaggaattatctgtatggaaagttcgatagcctggggattctatacgcttatgctgtttttcttcctgcataacgttgtggtagatctggtggatgccattccggtcattgccggaagaattggcggaacgcttattatcgcattgtatatctgcgacttctttcataccatgtatcaagagaagaaggatgacatcccggacaaggtctgggaactgaaagacagtttcagaagcctgttttccaaagaatcataaaaaagtattgacctttcagaaatgggagtatatactggaagcgttaaaggcgagggtgtcgtatcatggatacggcgccctttttgtatttggattctggacaatgacctgagtaaaagcatgaggtgctgagcaggcatgccttgatcacagccattggagacaaggtgaaccggatgatcccgccgctgactgtaacgaaaaggcaggtagatgaattgatggcgatcatgaaagagtctatcagcacggcagtaaaaaagtactgtgaaaaaggccaaaaatccgcctaggattccgtcatttccttagacttccgtctcgtcattgtattcaatgtcaggaagcagttcgaaataaaaatcctggtactctttggagagggcctgtatgatgaatttctgcacgatgcggaaccgggagatggagacctcatcgcggtcaaaagtaatatagacgctgatccataatttacgccctgtccgaacgatgtcgaagtagagcttgtcgtagccgtaggcatccagtatcggcgttataatgtctttgatattctgcaccgtctcttcttcgggcggcagaaggaacaggtctctaaggccggttgtcacggcgcgtaccggcaccgggagcatgaagatggaaaggatgatggcgatggcctggtcgagatatttggtaaggggaacaaaccattcggcctggatgatcagagggagaaagaaagcggcagacatccctaaggatgccaccgcgtcaatcttccattcctgaatctccatggtgacgataggcgaagtaagatccgcgttcatacgccttaaaagaaggatgacgataaaactgatcacggtagcagcaagttcaaaataagccactgcggaaaagttcacgtgccggccaccgtgaaggatgatctggatattatttacaatcaggcctacggttacggcaaccatgatggcgccccttacgacgacaaacagggattcaatctgcagatagccaaaggggcggctttcgttggaaggcttataaagcaagggaaccagagacaaggatacgaagatcatcaaaagttccacgccgtcgtagacggcatccagaaggacagcctgggaactggtatagattgccatgagcaattccagtccaacgaagacggtgctgccggtcagggatatttttaaggctgatttttcggatttttgctttaactggcttgagtgcatgatcattctcctttttttgctatggaatataataacataggaagaaaaacgctgcaaggacagaacgggaggaatgagtatgtatccggatcctatggaactgctgcgaaaatgcggcggatatctggatatccatggcatgctgcagctggggcagggattcgtgtttgacaagaatacgcctcctcacagcgaagcgttcggacattatgcggaaagcgtccgtgcctattgcggcgaacagggaatcatggggcttaagaatgtgacgcaggcacggatgctgcatcagttccgtatgtacatcgaccgccacaatatccgctatatcagagggcgctttaagaagcctggaatgacggatgaagaggctctggaattatacgtgcataagccggcagttgaaggagggctgggagggcaaagactgcttcgggagcctgcccggcttcacaataaatacccgtccgattccgattacaaaaggtatgcgaaaggcagggaaaataaaaagcgcctggcgccggatttccatgcggaatttattgtagatatccatgggaattttgtgagccagtggaacgtgctggaagaagatcaaaaaggcagggtcatcagcgacatagcatattatcgccgcaaatatcagaaaacaggagaagcatatgactgggaaggcgcacagcgtcagattatggatacggaatcctttaattacgccaacgccaatgatgtgatgcataaaatgctggatatcaagccgccgcaaaggtatgatacagacctgcggcggcagatctcctcaggatggaagagcccttccaaaaaaaactacgattatggaagtgacaaaggagatacgtactcccggagcagttcctgatagagcctgctgacgggaaggcctactacattgttatagtctccccggatgcatttgacatgaatggcaaaaggcccctggatgccgtaggctcccgccttgtctaaggaatcccctgtctctgcataagaacgcaggtcctccttgctgatcggatagaaggtgacatcagtggcttcaaagaaggtacgggtatggacctggcctcctttggccatgatcaaagagacgccggtatagacctgatgggtccgatctgccagcatggccagcatatcataggcttctgactgagtggcgggctttccgagaatttccccgttgtatgcgacgatggtatccgcgccgatcaccacgcagtctgcatccccataatgttcatatacatcacgtgccttctgggaagccagttccatgacgatttccgaaggcgcgtcttttgtgatcttttcttctactgaggaagggatgacctgaaaacggaatcctgcctgctctaacaattcttttcttctgggggatgccgaggctaaaatgtatttcattgatgattctccttttattttaattcctttattttgattcctttgtgcatattatagcagaatatgatataatatgcacattgtattatgcgaaggatttgcaaaggcgtcaaggattcgctataatgtttaaaataggacaataggataatggaggaagaagaaaatgtatatcagtgaaatcaggacatcggctccgacagacgaaagaatgccattggaaagaaagatgtatgacacgctggacaagttaaagataccatacgagcaggtggacaatgatccggcggcttccatggaagaatgcgcggcaatcgataaagccatcggcactcagatccgcaaaaacgtatttttatgcaaccagaaaaagacgaccttctttttgctggtaatgcctgcggacaaggcgtttgacacggcatctttcagcaagaagctgggggtatcccatatgtctttcgcgccgccggaaaagatgatggagcatttagggacgacgccaggctcagcaagcgtggcagggcttctgatggatgaagacgactatgtgcaggttatcgtggataaagaagtggctgaggcagaatggttcggatgcaacccgggtatcaataccagtcacttaaaatttaagacgaaggatctgttgaacaagttccttccttccatccaccacagagccagaattgtggatttataagattggatttatagagtaggagaacagtggcagatgaagacagcagaagatttaagacggttattggaacgaatagaccaccggagttatccggcctacaaagatacaaggggcgcatatcagtttggcaaatatgtgctgtccatagaccatgtgcagggcgatcctttcgctgcgccatccagattaagcgtcaaagtgccgggaaaggctgctgcctttccaaaggaactgtatgataagaagcataagcggatcgcgctgcaggattatctgacccggaatttctggaggcagacggagcattattcttatcaggccaaaggttccgggaaaagcggcgtcatatccatctccagatgcggacaggaagtcctggagagaactgcctgcaaggttgatgaaagaagcggggaggtgacagtacgattcgaggtaggctttccggcaaatggaaggaccatcaatgccagggaactgattaagatcttgtatgattatctgccgccttgcgtggacaaggctttgtgctaccccagtctggatccggaaaaggcaagaagggtcatggaactatccgttgaccaggcttatattcgaagccatcttgatgagatgggcctggtggcatttatcgcaaacggatcggtactgccaagggaatccggagtatcccagcgtccgatgaagggagggatacctttcgtatctccttcttcgatggaagtgaccctggatcttcccaataggggaaggattacggggatgggaatccgaaaaggggtaacactgatcgtaggcggaggatatcacgggaaatctacgcttttaaaggctctggaaacaggcgtatatccgcatatcgccggagacggcagggagtatgtagttaccgaagatactgcgcttaaaatacgggcggaagatggaagaagcattaagcagacggatatctccatgttcataagcgatcttccaaacggcaaaaataccgcttcctttgagacggaggatgccagcggaagtacttcacaggccgccaatgtagtggagggcctggaagcgggagccaggacattcttgatcgatgaagataccagcgccaccaacttcatggtgcgggacgaactgatgcagagagtcatccaccgggatatggagcctatcaccccttttattgagcgagtgagggatctgtatgaaatattcgggatatccacggtcattgtggctggaagttccggggcatattttgaagtggctgaccaggtagtgcagatggaccggtacgtgccaaaagagattaccgctcttgcaaaagacgcggccaaagagtatccgaaactaatgctgccggaagagaagccggcgcggccttcctttgagcgcatggtcagaagcaatccgggcatcaggagcaaaggaagagtcaagttaaagacattaggcagggacggcgtgatgctgaaccatgaaaccattgatttgagatatgtagagcagctggtggattcagagcagctgaccagcctggggaatatcgtaagatatctggaggaagaattgtttgacggcaagaagaccctgggacaggccattgaagagatgaatcggaggcttgcagcgcaggggcttgacgtattaagcgaaggcggctgcgtggcaggaaatctggcgattccaagaaagcaggagatctacgcctgcctgaaccgataccggcagttaagggggagtggaagatgagagtgatcgcaggcagcgcaaaaagaatccagttaaggacgctggacgggatggatacccggccgacgacggaccggatcaaagagactttatttaacatgctggcgccatacctatatgactgcatgttcctggacttgttcgcgggaagcggcggcatcggcatcgaagcgctgagccgtggaagcatggagaccgtgttcgtagagaagaatccgaaggccatggcctgcatcaaagaaaatcttacgcgtacccatctggagcataaggccatgaccatgacgatggacgtcatgactgccttatataagctggagggagaaaagcagtttgactatatattcctggatccgccttacgggaaagaactggagaagcgggtacttcagtacctggcagattcgagccttgtggctgcagaaggcgtaatcatcgtagaggcgctcaaagagacgaagttcgactatgtggaggacttggggctcaatatcatcaagacaaaagagtataagacgaataagcatgtgtttatagagccgtcaggaaggaaagaaatatgttaaaaggaatctatccgggcagctttgacccggtcacttatggacatctggacgtgattgaaagatcttcaaaattggttgatgaattaatcgtcggagtattgaataataaagcaaaaagcccgttgttttccgcagaagaacgtgttagaatgttaaatgaagtaacaaaagacatgccaaatgtgacggtagttccatttgagggactgctggtggactttgcccgtaagatggatgcgggattggttatacgtggattgagggcaattacagacttcgaatacgaactgcagatggctcagacgaatcataagatggaacctgatgttgagactgtatttttaaccacaagcctggattattcgtatttgagttctaccacagtaaaagaagtggcggcttttggaggggatatttctcagtttgtaccaggaatcgttgcagacttgatagaagagaagatgaataaaaggagagtgtaaattatgagcagccgtattgagcagattattgaagagattgaggagtatattgacagttgcaagttccagccgctgtctacgtcgaagattatcgtgaacaaggatcagatggatgaattgctccgggaacttcgcatgaagacgccggatgagataaagaggtatcagaagatcatcgccaacaaggatgcgatccttgcggatgcccaggccaaggctgacagtatgatcgaggaagcgcagatccataccaatgagttggtaagcgagcacgagatcatgcagcaggcgtatgcccaggccaatgagatcgtgacggcagccacagagcaggcgcagcagatcctcgacaacgcaacgaatgatgccaacgatatccgtattggcgcgatgcagtatacggatgatcttctgtcaaacgcagagagcattatcggacatacgcttgacagttatactaccaaatatgatggtcttgtgaattccttgcaggagtgttatgacatggttcgcaacaaccgttcggaactggagattccggaacagtcccagagaggtcttgaggcagaatacggaagttatgagcctgaaccggaatacgacctggatgatgaagacagcgaattagaataatcgtatatatgtataggcaagcaagctggttaccagagtggtaatcagcttttctattaggtagggcgtgataggaagcctggttccctgcaccatggaccgggtctgggcaacgctgcaccatcctccgaaggaagtaagtgccagggacaggacgaagcaggcatccgcaggcagggacgaggcgcagatcagagggattccattggtcatttccagggatggaaggaacaggagagagaacaggaaatgattaagaggcagattctggaataaagcgatcagaatggaaaagagcataatatatccccctaccttcgtgatggcctcaaatccgttcatgatgcaggaatccatcaggcttccggcggctgctcttggaagcggcgagcatttagaggaacgggatctcgcacctggccggtagtagattcgaaagaggaagctgcataggatcggagagagaatcagaatcagcaatgcaggcatggtgcgggaagtatcctttagattctgccatacgacgtagctgatgatgaacataggactgatgttgttggtaaacgacagcagatattgcccttcctgccaggtgatgtactgctttctgaccaggtcggcagtcacttttccacccatgggataaccgcacaggaagcccgcgatgatggcaaaagagccatatctggtcacgccgaagagcctgcacaagaatggcccgaagacttttgagatggcatcaatggccggggtaccgatcagcaggtttgagacgatcataaagggaagcaaagttggcaggattacattgaaccataaaagcagcccggaacttgcgcctttgaacaccggctgcgggaataggagcataaggacgaagagcgcgatgacgcaaagggaggtaaagtatcgtttcatgcggttttaaatccagtcatatttctttagttttattctatggaaacggttgattttttatgtgggctgtttcataatagaacatagatataggttaatttaagaaaagaggataactaagatggcagtattagagaaggtagaacctgaaaaagtatttcgattttttgaagaattatccaggattccccatggcactttcgatacacggcgaatcagcgactattgcgtagcatttgcgaaggaaagaggcctggaggtgattcaggacaaagtgggaaatgtcataatcaagaagccggggacgccgggatacgaggactcaaagccagtaatcctccaggggcatctggacatggtttgtgagaaaaagcctggatctgcccacgattttacaaaagacgcccttgaattatatgtggaagacggctttgtaaaggccaaagacactacgcttggcggagatgactgtatagcggtggcgatggttatggcagtacttgacagcagcgatattgcgcatcctccgatcgaggccctgttcaccatcgacgaggaagtgggaatgacaggggcaaaagcggtggactggacattgcttaagggacggatgctgattaatatcgattctgaagaagaggggatccttacgacgggatgcgcaggcgggatccaatatgagacaaggattcctatccacagggagaagaagtccggcagcctgatcaccatcaagattcatggccttaagggcggccattcaggcgcggagatccacaaacagcgtggaaacgcccacaagatgatgggacgacttttataccgtattaccaaggagatgcctgcagatctggtggagattaatggcggcaccaaggacaatgtgattgccatggaatctatggcggagatccttgttccagaattccaggcggagaaggcgataggcatgattcgcgagatgaccgggatatggaatgaggaattcttaaatgacgagccggatctggcggtggacatgaaggtatctcatgattctacggtggacgtgtgcgatcagtattctacggatcggatcgtggcatacctggagatctgccccgatggcctgcagggattcaaccgcagcctgaaaggagtggtagagtcctccctgaatatcggtattgtggagacggcatccgattatatcagaaccgttcatttaatcagaagttccgtggaaagcaggaagacccagctcttcgagcaggtggagcagtgcgtgaaggcgctgggaggtacgggaacgatcacctcggagtatcccgcatggcagtttaatccggattcaaggcttcgaaggatcatggaagatacatatgaagatcagtatggcgctaagccggatatatcaaccatgcatgcagggctggaatgcggactgttcgtaggacagcagccggatctggactgtgtttccgtgggaccaaatataccggatgtccattctttccgggaaagactggatattgagtctactgtgcgtacctgggaatatttgaaaaagattcttgaaaattgcagatagtccggcagtaagagccggatccctacaggcatagggatccggctcttttgcatatagtgataaaaaaaggaattgaccctatgaatcagaaaacaccgggaagaattctgctggccatattgctgctggccttatttacagtgcttggaaccgactatttgaaagaacttagccattacaataccctccagaaaaagacgatagaggacgaagaatatcggagagaattcttttgtgacgctatgagaaagaacaaaggactcatgtctgaagcgtgcagaaagatgctctccaatgtggaaaacgaagtgacttatttcccaattcctgaatccactgtggataagtcgctgaaagtctcctatgtagacagttggatgggagaacggaaatataaaggaaccagcgggcatgaagggacggatattatggcattgaaaaacgaaagaggcgtctatcccgtgctcagcatgacggacggaacaattacaaatctaggctggcttgagaaaggcgggtaccggatcggtgtgactacagatagtggtacttattattactacgcacatctggattcctatgcaaacatccagaaagggaatcgggtgaaggccggggaactgctgggctatatgggggacactggatacggagaagaagggacgaaaggtaaatttgatgtgcatctccatgtgggaatctattcttatgaagagggtagggaaatcagcgtaaatccttactatgtgctgctgtatctggaaaataagaaattaaagtatgcatattcctagagttataccatggaatgtgttatacttaactacatatgtaaaaaaatacttactgacggaggatggataatgaatctgcccagtgcattcgaggaaaagatgagaggactcttgcaagaagagtttgacgaatatatagactgttacgaggagccaagatactatggcctgcgggttaataccgccaagataacggtagaagaatttgagcggatctgcccttttgagataacgccgattccgtggattgagaatggattctattatgatggcgagaatgtagcgccggcgaagcatccatattattttgcgggcctttactatctgcaggaaccaagcgctatgacgccggccagccgtcttccggtggagccgggagacaaggtgctggacgtgtgcgccgcgccgggaggcaaggcgacggaactgggagcaaggctaaaggggcagggaatgctggttgccaatgatatcagcagttccagggctaagggacttcttaagaacatggaggtcttcgggattggcaatatgctggtgctaagcgaagagccgggaaggcttgaacagtatttcccggagtattttgacaagatactgatcgacgccccctgctcgggagagggaatgttccgcaaggacaagaagatggtgaaggcctgggaagagcatgggccggagttcttcagcaacatccagaagaacatcatcctccaggcagcgcggatgctaaagcccgggggcatgatgttgtactctacctgcacctttgatggcagggagaatgagcggatcatagagcaccttaaggaatcctgtcccgaattccagattttgaagatcagcccttattccggcttctgccagggaatgccacagtgctcggagaacaatgatccggaacttgcgaagacggtgcggatctttccgcacagaatgaagggggaaggacattacctggcgcttctaagaaaaggcgaggcgcaggagaaagcgccgaaagaattgaggaagaagaacacccggaagatgccggaagagttggagagattctttcgcgacgtatcttggaatctggtaacgcaaaggctggatatccggggagaacgggtttactatatgccggaagggcttccggatgtgcggggaatccgtttcctgcgaaccggccttcttctgggagaattgaaaaagaaccgatttgagccaagccaggcgctggctatgtgcctgaaaaaggacgagtatgcccattgcattgatcttccggcagaagacgaacgggtacgaaagtatctgaagggcgagacgctggaacttgctgacatgacgctgcccatcagcaagggatggtgcctggtgtgcgtggacggatatcccttaggctggggcaagcttgccggaggagcattgaagaataagtatctgccgggatggaggctatgctgatgatacggctggataagtatctggcggatatgggaatcggaacccgccaggaagtaaaaagatacatccgtcagggacgggtgagcattgacggcattcctgccaagtcgccggagacgaaaatagaggaaaaggcgcgcaagataacctttgacggcagagaagtggattatgcggactatgagtattatatgctaaataagccgtccggcgtcgtatcagccacggaagacgcaagatgtgctacggtcatcgacctgatccgggataagaagcgaaaggatctcttcccggttggccggctcgacaaggacacggagggactgcttcttatcacgaatgacggacagctctcccaccggctgctgtcgcccaagaagcatgtggacaagacctattatgccaaagtggccgggaaggttacgaaggaggacgcgaaagcctttcgggagggcgtcaatataggaaccgaagagaaagaagaatggaccaggccgggcgtgctggacattctaaagagcgaggaagtatcagagatccgccttaccatccaggaagggaagtatcatcaggtgaagcgtatgttccaggccgtcggaaaggaagtcctttacttgaagcgggaatcgatgggctgcctgaaactggatgagacgcttaagccgggggaataccggccgcttacaaagaaggagttagaaaatgttgcagacgaaaatgcttgaagatgtggaagcgattatatttgatatggatggaactctgattgattcgatgtggatctggccttccattgacgacgactatctggcaaagtatcatttgacgaagaccgacagtttccatgaagatatggaaggcatgagttatacggaagttgcccagtttttcctggatacgtttccggaccttgaccttacccttgaggaagtgatggatgaatggatggatatggcgtatgataaatatatgacacaggtagagttaaaggaaggggttcatgattttatcctggagatgagaaggcagggaaagaaaattggaattgccacaagcaatgcaaggaaactggtggatgacacgctacgggctctggaggtagaaggactgtttgattcggtaagaagcgcctgcgaagtggctgcgggaaaaccttctccggatgtgtaccttctggtggcaaaagagatgggcgtgcatccggaaaactgcctggtgttcgaggacgtccccatgggcatcctggccgggaagaatgccggcatgagagtatgcgcggtggatgacgacttttccaggccccaggaggataagaaaaagaaactggcggattactacatacaggattattatgacatcaagaaagagacttacgaggtattgtgatgggaacaggatttttgccgatttgcaggaaggatatggaagaattgggatgggacaggcctgatttcgtctatgtgtcaggggacgcatatgtggatcatccttcctttggccatgccatcattacccgtttattgcaggcgcatgggtataaggtatgcatcatcgcgcagccggattggaaggacaagcaaagcgttacggaattcggagagccaaggtatgcattcctggtgtctgccggcaatatggattctatggtaaaccattattccgtgtcaaagaagcgcaggcgtacggatgcatttaccccgggaggcgtgatagggaaacgaccggattacgctacggtggtttacagcaacctgatccgccaggtctataagaagacgccgatcattctgggcgggatcgaggcaagcctaaggcggctagcgcattacgactactggtctgacaggctgaagcgctccgttcttctggattctggtgcggatctgatctcctatgggatgggggaacgttctatcgttgagattgccgaggcgctggagagcggaatcgatatcaaggatattaccttcattccaggaaccgtatatcggaccaaaagcctggagagcgtctacgacgctatatctcttccaggatatgaagagatgaagagagaaaaacttgcgtacgcgcgcagtttttatacccagtacaagaatacggatccatttaccggaaagaggctgatagagccgtataatgagcatctgtacgtggtacagaatccgccgtccatgccgcttgacgagtcggagatggatcaggtctacgggtatccgtataggaggacgtaccatccttcctatgagaaactgggaggcgtgccagccatctcggaagtgaagttcagcctgatcagcaaccggggatgctttgggggctgcaacttctgcgcccttaccttccaccagggaaggatcctgcagacaagaagccatgaatccctgcttgatgaggccaggaagcttacggaggataaggatttcaaaggatatatccatgacgtaggagggccaacggcggatttcaggcagccttcctgcgagaagcaactgacttgcggcgtgtgcaaggaaaagcagtgcctgtttccgaagccttgcaagaacctgaaggcagaccataaggattatgtccggctgctgagagaattaagggcgcttccaaaggtgaagaaagtgttcattcgttcgggtatccggttcgactatgtcatggcggataaagacgacacttttttacgggaattgtgcaaatatcatgtcagcgggcagctgaaggtggctcccgaacatgtctcggacgcagttcttaagaagatgggaaagccggagaatggcgtatatcagtcatttgtaaaaaagtatatgaagatcaaccaggagatttccaaggatcagtatctggttccctatctgatgtcttcccatccgggctccaccatgaaggatgccatcaagctagcggaatatctccgggatctgggatatatgccggagcaggtgcaggatttttatcctactccgtcaaccatatctacctgcatgtattacacaggcgtcgatcccagggatatgtcgcccgtatacgtgccgaagaatccgcatgagaaggccatgcagcgcgcgctgatccaataccgggatcccaaaaactacgatctggtaatggaggccttgcgaaaggaaggcaggatggatcttgtgggatttgaaaagcattgtctgataagacccagaaaaataggaaagaagcaaggaacggattcttatgcaaatgcaaagaagaagacgatccgtaatgtgcatagaagaaagaaaaagtagggagatggtatgatgagaatagcggtcataaccggggcatcttcaggaatcggcagagaatttgcccggcagattcccaggctgtatcatagcctggatgaactgtgggtagtagcgcgcaggaccgacaggctgaaagaactggtgaaggaatcggaggttcccgtccggatctttgatggtgatatgatgcgggattacatcttctcgcggatagaaaaggaactggaaagatatagcgcggatatccggatgctggtaaatgcagcaggttatggaaagatcggagcagcggaggaattggagatggaagagcagtgcggcatgatcgatttaaactgcagatccctgaccaagctgacactcttatgcttgccatatatgacaaaaggaagtagaataattaatattgcgtccgcggcagcattcgccccgcagccgggatttgccgtgtatgcggctacaaaatcctatgtatacagtttttcacaggcgatacgggaagaaacgaaaggccggggcattgtagtcacggcagtctgcccgggccccgtggacacggaattctttgatcgggcaggagaacttaagaatttctggaaggcgaccgtcagggcggatgccccgggcgtagtcagacaggcgttaagggattctgtcaggagaaagccggtatctgtgtatggcgccgccatgaaaggagccagggtgctggcaaagatcgtgccggatgcgcagattgcatccgctatggcgtggatgagcaaaggaagccgcgaatcaggataaaataggaaataagggagagtgtacaaaatgatgaagattgagaaaggacagccgggatatgtgaaggcccgcaaggtcaagtatctgatctggaccattgcagaatttggggtagtgattgctatattcgtgctgggatacatgcagacgggaacacggatgaacctatttacgatcgtggcaatcgtaggctgccttccggcggccaagatgctggtggaattgatcacgatggcgcctcacaaaagcattgtgccggataagtacaaggagattgaggaaaaggcgcctctggttaccagagtctatgatatggtgatcaccagcagagataaagtcatgccagtggacgcgatcgtaatatccggccatgtggtatgcggatatgccagcagccccaggacagacgagacccttcttgcgaagcatataaaggatatgctgaaagccagccactatgacaagatgacggtaaagatcttccacgattacgtcgccttcttgtccagggccgaagggatgaacaatattgcctcgattgaaaaggcggataccaggaaaaaagaaagagagatcagaaatatcattctgaatctttcaatgtaacgagtatttccaaaaaggactactatgaaagaaataataattagccagaatgaagcaggccagaggctggataagttcttaaaaaaatatctcgccaaggccccgggaagtttcttatataagatgctgcgcaagaagaatatcgtgctcaacggcaagaaggcaacaggaaatgagaagttaggcgtgggggacagcgtgaaactgtttctggcggatgacacgattgggaagtttgccggcctggtgcctataaaagaagagtaccaggtatccgtgaatctggatatcattcatgaggatgctaatgtcctattcatcaataagcctgcggggatgctgtcccagaaggccgcaaaggacgatgtgtccatggtggagcatgtgatcgcctatctgcttgcagaagggagcatcacgcaggaggaattgcggacattccgcccgtccatctgcaaccgcctggaccggaataccagcggcctgatcgtggcaggaaagaccctgatagggctgcaggccatggcaagacttttcaaggacaggaccctgaaaaaatactatctttgctttgtaaagggcgggatccgtaggcgggagcatatctacggctatctagccaaaaatgaaaagaccaataaggttacgataagggaggcaggggatacgccgatcgagacggaatatgttccaattgcatataaccaggagatgaccctgctaaaggtgcatctaatcaccgggcgtacccatcagatccgggcgcaccttgcttccaagggacatccccttctgggggactataaatacggcgatgcaggatggaaccggcagtttcaggaacgctatcaggtaagagcccagcagctgcatgcatatcagatgaaactcccctggatggaggcgcctttggatgaaatatccgggatgacttttacagccaaggttccgcctctattctggagactgataaaggagacaacatgggaacatggaattcaagaggccttagaggttcaacattagaagagatggtcaaccggaccaacgaatggtatctggaaaaagggcttgccctgatgcagaagataccaacgcccatcactccggtaaagatggacaaggagcacaggcagattacgctggcctactttgaccagaggagcaccatcgactatattggcgccatccaggggataccggcgtgctttgatgccaaggaatgcgtggcagagacatttccgcttcagaatattcatgagcatcaggtgacattcatggcggaattcgagaagcagggaggaatcgcctttatcctgatctactatatatccaggaatattctgtactatatgcgatttgaggaactttacagattctggatgcgggccaaagaaggcggcagaaaaagtttccggttcgacgaactggattccagattcttcctggagtttatgaggggctgctacgtcccctatctggatgctatgaatctggatctggagttgcgggaggaacttgacaaagagtaggaaaatgcttataattcaatagggtttttaacatggtagcacactaaagtgcggaggatatatgaatttggaggatatatgaagaaattattacatactccggaaggagtcagagatatatataatgtagaatgtgggaaaaaactagcattggaaggacgtatcaaaaaggtattccacttatatgggtatcatgatatccagacgcctacgtttgaatattttgatgtgttccgcaaagagattgggaccgttccttccaacgaactgtataaatttttcgataaagacggaaatacgctggccctcaggccggatatcaccccgtccatagcccgcgcggcggccacgctgttccaggatgaggaactgcccatcaggctttgctataccggcagcacctttgtcaaccattccaactatcagggacgtctgcgggagaccacccagatgggcgcggaactgatgggagatgactccgtggaggcggatgcggagatgctggcgctggtgatcgagtccatgctaaccatcggccttaaggaattccagctaagcgtaggcaatgtagacttctttcagagtctgatagaggatgcctgcctggatgaggaggcggaattgcgtgtgcgggaattgatcaataaccggaattattttggcgtggaagagttccttaacagcattcaggtaaagagaagttccaaggaagcgttttcggccttgaatgaattggtgggcgggatcgacatcctggcgcaggcgaagaatatcgcgccgaattccaagggcgtgatggcagtaaaaaggctggaaaagatctatgacaccttgaaactctatggcgtggagaaattcgtgacctttgacttaagcatgagcggaacttacggatactataccggcatcatcttccggggctatacctttggcaccggggatgccatcgttaagggaggccgctatgatcatctgctggagaagttcggcaaagaattcgcgtccatcggctttgtcatcgtgattgatgagctgatgaacgccctgatccgtcagaaggtccgcatcgtttataccaggaagaatacgctgatcctctatgatgagggaaagcagcgggaagctattgcccttgccaaagatttccgccggaaggctaagaatacggaattgatcaagaaatccaaaggcaagctgctggaggagtatgtagaatatggaaaagaatactatgccgggaacctgatttatattaagaaatctggcgagatcaccatgattaatctggtcaccggagagcataagatcgtgaatagcacagataggagttagaccaaatatgagatacttgacatttgctttgggaaaaggacgtctggcgaaccagacgctggaatcgtttgaaaaaatcggaattacctgcgaggagatgaaggataaggagtcccggaagctgatcttcaccaatgaggagttgaagcttcgcttcttcctcgcaaaggggccggatgtgcctacttatgtcgaatacggcgctgccgatatcggcgtggtaggaaaggacacgattctggaagagggacgcaaggttcatgaagtcctggatctgggatatgggaaatgcaagatgtgcgtctgcgggcataaggaggcagcgccgcttctgcagcatcatgaattgatccgggtagccaccaaatatccgaatattgctaaggattatttctacaataccaagcatcagaccgtggagatcatcaagctgaacggctccatcgagctggcgcctatcgtggggctgtcggaagtaatcgtggatattgtggagacaggctccacgttgaaggaaaacggtctggaggtactggaagaagtgtgcccgctatctgcaaggatgatcgttaatccggtgagcatgcgtatggagagcgagaggatcaaatcccttcttaccagattgcgcgcgcagatcgcgatataaagaaaggaagaggctatcatgagaatacaacgtttagatgcggatacaagacaaaatcttctggaagacctgctgaagagaagccccaacaattatggtgagtacgagaaaggggtggcagagattcttgcgcgcgtgaaaagagaaaaggacgaggctgtctttgactatacgcgtaagtttgaccaggcagtcatcagcgccgcgaatatcgaggtaacggaagatgagataaaggaagcctatgaactggctgacccggcactggtggagattatccgaaaggccctcaagaatatagaggcttaccatgagaagcagaggcagtacagctggtttgacagcaagccggacgggaccatgctgggacagaaggtaacgccgcttaagcgggtaggcgtatacgtgccgggcggaaaggcagtatacccatcctccgtgctgatgaacatcatgcctgcgaaagtggcaggcgtagaagagattattatggtgacgccgccggataaggacgggaaagtcaccccgaataccctggtcgccgcccatgaggcaggcgctactgccatctataaggtgggcggagcccaggcaattggcgcgctggcgtatggaacccagagcattccgaaggtggacaagatcgtaggcccgggcaatatctatgtggctctggcgaaaaaagccgtgtatggccacgtaagcattgacgccattgcaggcccaagcgagatcctggtgatcgcggatgaatctgccaatcccagatatgtggcggcggatcttctgtcgcaggcagagcacgatgaactggcttccgcgatcctggtaaccacaagcgaggaactggcagaacaggtatcggaccaggttgacgcattcttaaaagaactgccaagaagcgggattatcagcaagtctcttgacaattacggctacatattgatcgcggattccatggaggacgccattgagaccgcaaacgagatcgcgtccgagcacctggagatacagacgaaggatccttatgacgtgatgacaaagatccgcaatgcaggcgctatctttatcggcgaatattccagcgagccgctgggagactattttgccggaccaaaccatgtactgcccaccaatggcacggctaagttcttctcgccgctgtcggtggacgactttatcaagaaatcaagcatcatttcatactccagaaacgcgctggaggcaatccatgaggatatcgaggactttgcgaaggcggagcagctgactgctcacgctaattccatcaaagtccgctttgaatagacggatgtaaaatacgaagacagggggctagaagcatgaatcgaacagccagttgtacaagaaccacgaaagagacggatattgatcttacgctgaatctggatggcacgggaaagacgcagatcgacacaggagttggattttttgatcacatgctggatggatttgccaggcatggattattcgatctgacggtgaaggtcataggagacctggacgtggactgccatcatacgatagaagatacgggaatcgtcctgggacaggcaatccttgaggccatcggcgataaagccggaatccggcgctatgggcatttcatgctgccgatggatgagacgcttgccttatgcgccgtggatctctcaggaaggccctatctcagattccaatctgagtttacagcagagcgtatcggcgatatggatacggagatgatcaaagaattcttctatgcagtgtcttacagcgcgatgatgaacatccatcttcgcattctggatggggagaacagccatcacatggcagagacgctgtttaagagttttggaaaagcactggacatggcaacgctacctgagccaagaattcaggaagcatggactacaaaagggagcctatagaggaggcggcataaatgatgagttataaaagattgattccctgcatatttattgcaggcggcaaagcggtaaaatggttcgacgacgatacggttatgtcagatgacgtcatcgggcttgcaaaatattacagcgaccatggggctgacgaactgctggtctttgacctgtctgattcggacgaggagcatgacgaggcgatagacttgatgaagcggatgaaccgcatgatacggattcccatggttgcaggcggaaacatcaggaggcaggaggatattaagaagattctgtatgcaggtgccaagcgcgccatgctgaatttctccaagtcggacagcgtgaagttgatcgaggatgccgcgaagcgcttcggaaaggagaaagtggcggtgtccttgaatgactttgacgcgctgttcaagcatcagcacctgattaatgactatagcagcgagattatattcatgcatcgtctggatctcaactctgttatgaatgtgacagaggtgccctgcgtaatcgtgaccgacaccatggaggagccggaactgtacaagatattgaagtgtccgggagtcaaaggcctgtctggaaagttcgtcagccagacggatatggatttcgtggaattcaaggaaaaatgcggccaggaggagattaagatgacttcttttgaaagcatgatggaattctcccagttcaagacgaatgagcaggggctgatcccggtggtcgtacagcactataagactcaggaagtcctgatgctggcatatatgaacgaggaggctttctataagaccattaagacggggaagatgacctactatagccgcagcaggcagcaactgtggaccaagggggagaccagcggacatttccagtatgtcaaatccctgactatcgactgcgactacgacaccttgcttgcaaaagtggaccagatcggggcggcttgtcatacgggcaatcctacctgcttcttccagcctctggtaggcaacgattatgacgagaccaatcccctccaagtatttgaagcggtgtacgacacgatcgtagaccggagggagaacccaaaagagggctcctataccaactacctgtttgataagggaatcgacaagatattgaagaaggtgggagaagaagccactgaggtagtgatcgctgccaagaacccgaatccggaagaggtaaaatacgagatggccgatttcctgtaccacgctatggtactaatggttgaaaaaggcatcagctgggaagatatcataaaagaactggcggaccgctagaaacaggaatgaacaggcatgggtcatgcatatactttcttaggctatgattgtttcataagtaagaaaggaagatcagcatgaatgattctgaaaaacgaagacgccagcttctggaggagacccgttccttatacagcgacagaaattcgccgccggcagtccatccaaggtacaagttcgcctacgcaaggctgtacgggagtgaggatgagatggcgccaggcacgtttggtctgcgcctgttcctgtgctttatgctttttgcggcatttgtagccatggataataatgggattaccgtaaaaagcgtaagcagcgaccgcatcgtccaggagatcacgacggatctggatgtggcggaagtatggaagaacctatagatttcaacatttgttgacacaggaaaaagaaattgatataatagtctccgtgagagaagaaaaaagcgttgatttactctaatcaacgcttttattatgctaaggagggtgttagaatgatcaaaatttggatagtaggttcctccggacagataggaactgcaattaatgaagtcctggatccgttagaagtggaagtcttcaacacggataaggacgaactggatataacagaaacggacgaggtgctgaattttggcgagatcaaccgtccggatgttattatcaactgcgcggcggtcacggacacggatgtatgcgagagggagccggaactggctttccgcgtcaatgcgctgggcgcgcgcaacttaagcatcgtggcgcgcaaagtaggggccaagatggtccagttgtctaccgatgacgtgtttgacgggctgagcaagactccctacagcgagtttgacgataccaatccaaagaccgtgtacggccgctctaaaagagccggggaaaactatgtaaaggagtttacccataagcatttcatcatcaggagcaactgggtctatggacgagggaataatttcgtgacgaaagtacttgatgcggcggatgagggaagaacgcttgcagtggcatccgaccagtttggctctccgaccagcgccaaggatctggcaaggattatcctgtatctgatccctaccaatgagtatggtacctaccacgccacttgcaagggcgtgtgcagccgctatgaattcgcccaggaaatcctgagattttccggccgggaaggcagccttaaggcggtgccgaccagcgagtcggatctttcttccgaaaggcctgcctacgcggtgcttgacaacttcatcctgcggatcatcgatgtgtacgagatgccggaatggaagcggtcattggaagagtatatgaaggaaagagaggaggactaggatgggaaagacagaaaaagcaaagaagattggacttacgacaaagattttcatcgccctaatcgcgggtgcgatattcgggattatcctatgctatctggtaccttccgggcatgtcagagatgatatcattgtagaaggaatcctatatgtaattggacaagggttcatccggctgatgaagatgctggtggtgccgctggtattctgttctctggtgtgtggaagcatggccatcggggatacgaagaaacttggcacggtaggggtgaggacgctgatcttctatctttttacaacagccctcgccatcaccgtagcgctgacagtaggaaatattatcgatccaggcattgggcttgatatgagcgcgatcaagacgaacgctgccgatgtggcgcagatggaggccacatcgcttaccgataccctgctgaacatcatcccggacaatccggtcaactctctggccagcggcagcatgctgcagatcatcgttttcgcgctgatcatcggcgtgatattggccaaactgggcgatcgggctgagacggtcagcaactttttcggacagttcaatgatatcatgatggagatgaccatgatggtcatgagtctggctccggttggcgtattctgcctgatttccaggacatttgccaatatcggctttagcgcgttcctgccactggggaagtatatgatcggggtgctgctggctctggcgatccaatgccttgtcgtatatctgggactgcttaaagtattcacgggacttaatccgatcaaattcattaagaatttcttcccggtgatggcatttgcgttttccacagccacgtccaatgccaccatcccgctgtctatcgatacgctggcgaagaagatgggcgtatccaagaagatctcatctttcaccatcccgcttggcgcgaccatcaacatggacggtactgccatcatgcagggcgtagcggtggtgttcgcagcccaggcattcggaattcatctgacgatgacggactatattacggtcatcggaaccgcaacgctggcatccatcggaaccgcaggcgttcccagcgtagggcttgtaaccctgactatggtattcaattccgtaggccttccggtggaggcgatcgggctgatcatgggcattgaccgtatcctggatatgaccaggacggcggtcaatattaccggtgatgccgtgtgcacgacgatcgtggcgcatcagaacaaggcaatagacagaagcatatttgaaaatgctcagtaaagccgcaaactgtcaaaggagagccttccgcgtggggctctcctttccttacattgaaaattatttgcttgaagttctaccataggatgatataataaaagcgttatgtaacatgcataaagtataaaggatgaaaacatgagaagattagcattaagtgatgaaatattattaaaaatcgaaaagccggcccgctacatcggcaatgaagtaaactcgacatataaggataagacgaaagtggacgtccggtttgccatgtgttttccggacgtctatgaaattggcatgtcccatctgggaatccagatactgtatgatatgtttaaccggcgggatgatgtatggtgcgagcgggtctattctccgtggacggatctggacgcgataatgagggagcagaagattcctctttttgcgctggaatctcaagatcctatcaaggattttgattttctgggcattacgatccagtatgagatgtgctatacgaacattctgcagatcctggacttaagccagattccctggaaggcctcggaccgggatgagtcagacccgatcgtcatcggaggcggtccatgcacttataacccggaaccgctggccgaattttttgacctgttctatataggagaaggggagacggtttatgaacagcttctggatgcttataaagagaacaagaaaaatggtggtaccagaaaggactacttagaaaaagcggctgaaatcgaaggaatctatgttccgtccttctatgacgtggcgtataaggaggatgggacgattgcttcctttactccgaataattcccatgcttcagccacgattcagaaacagatggtaacggatgtgaccaatacctattatcccaaagccccggtggttccatttatcaaggcgacgcaggatcgggtcgtactggaaatccagcggggatgcatccgcggctgtcgtttctgccaggcaggcatgctgtaccgcccaacccgggagagggacgtagaggtgctgaaggaatatgcctacgagatgctgaagaatacaggccacgaggagatatccttaagttccttgagttccagtgattacagccagttaaaggagttggtcacctatctgattgaagcgtttaaggaggaaggaatcaatatttccctgccgtcccttcggatcgatgccttttctctggatgtcatgagcagggttcaggatgtccgcaaaagcagcctgacatttgcgccggaggcaggctcccagcgtctgcgggacgtgatcaacaaggggctgacagaagaggtgatactggaaggggccggacaggcctttgaaggaggatggaataaggtaaagctttattttatgctcggcctgcctacggagaccgaagaagatatgaaagagattccgaggctggcggataagatcgcccggagatattacgagatccccaaggaggaaagaaatggaaaatgccagatcaccacaagcacctccttttttatccccaagccgtttactccattccagtgggcaaggatgtacagcaataaagagtatattgccagagccgccatcgtaaagcacgagttccaggagcagctcaaccgcaagagtttgaaatataattggcatgacgcggagactacggtactggaaggggtcctggcccgcggcgaccggaagatcgggcaggtcattgaggaggcctaccgccagggatgtctgtacgatgcctggagcgagacgttttgttatgataagtggatgaaagcctttgaaaacacgggcattgatattgagttttataactgccggcagagagacgcggcggaaatattcccctgggactttattgacatcggggttaccaaggcctttctccgcaaggaatgggagcgcgcactggcaggagaggtgacgcccaactgcaggatgcagtgttccgggtgcggagccgcaaagtataaaggaggtgtctgcattgaaagcaagaattaaatttcggaaatatggagtcatgaaattcatcggacacctggatatgatgcgttttttccagaaggcaatgcgaagggcccagattcccatcgccctcagcggagggtacagccctcatatgattatgtcctttgcccagcccctgggcgttggacttaccagcgacggcgaatatatggatgtggaattaaaagcgccgatcgcctctgccgaggcagtagaacggctgaataaggccatagtggaaggcgtggaggtcgtaagcttccgggagattccggatgagaagaaggcaagcggcatgacgatcgttgccgccgccgattataaggtgacgctgcttgcgtcttccaggacgtccgaggtaacagaagacatcccggatcgctggatcgaaaagacggaagcattcatgggccttcctgagatcgtggtgatgaagaagacaaaacgcagcgagaaagaagtggatatcaagccgatgatctataatatgggggcatgcaaggatggatggcatctgttccttgcgaccggaagcgagcagaacttaaagccggatctggtgatggacgcatttctgaagtattgtggagaagagcctcagaatgtgccgcttcatttccatcgcctggaggtatatgccagacaggatggaacgccgtctggcttcgtaaccttagaagcattgggaaaggaaataagcctgtgatcgaatatattcccgccaagaccatcgtgacgaggatgaaaaagcccggggaatggtttggcgccgattataatatgaatatctataagggctgctgccatggctgcatctactgcgacagccgctccgaatgctatggcatccaggaatttgacaaggtcatggctaaggaggacgcgcttcggatcatccgggacgatctgcgccgcaaggtaaagagaggagtcgtggccacgggagccatgagtgatccttacaatccttacgaaaaggaactgcttcttacccggcatgccttggaactgtgcgatgcgtttgaattcggcattgccatcgccacgaagagcagcctgctgacgcgggatatagacgtcctatcagatatcaagtcgcattccccggtgctgtgcaaggtgaccataaccaccagcgacgatgaacttgctgccaagatcgagcctggcgtaggcccatcctcggaacgcttccggatgatccggagactgtcggatgctggaatctatgcagggatactgctgatgccggtacttccttatctggaggattccccggagaatatccgccagattgtccaaatggcggcggatgccggagccaggtttatctacccggctttcggagtgacgcttcggggcaaccaacgggactggtattacggcaagctgaatgaactattcccgggacagggatatgtggagaagtatcagaaaagatatggctcttattatgaatgcagaagcccgaaggccaagagtttgtggaacgtcctgaaagaagaatgcgagaagcatcatattctttaccagatgaaagatatcatccacagctacaggcacccttatgcatatgagcagttaagcttattctaacattgcgcggcatgcacatgcgacaggaggaatgattatgagcaagaaggaagtaaagaccaatgccatgcgcatcttggaccggctgaagatttcctatgagtatacgacttacgaatgcgatgaatttacggacggagtccaggtggcggacaagctgggctatccccatgaactggtttacaagacactggtaaccattggaaagagtggcggatactatgtatttgtcattcccatagaggcggagatagactttaagaaggcagccagaacggtgaaggaaaaatccctggagatgctgcatcttaaggatctgacaaaagtgacgggttacatcagagggggatgcacggcaatcgggatgaagaagcagtttcctaccgtaattcaggaaagcgcaaaggaactggaacagattcatatcagcggagggcggcttggcatgcagctgaaattatcgccatttgacttgcaaaaggcagcaaatgccgaattcgccgatgtgatacggagggattgaaccggtgcagatgccgtgttctatgatgaccgccctgaaaatgtaggaaccgcacagaggcttgggatcaagggaattgtatttcataaagatatttcattgcagatgatggaaaaatgatgtaatataatagaagtcatttatagaagccataggattaagcagtttggaggaatacaagaagagatgaagatagttgtaaagtttggtggaagttcattagcaagtgcagagcagtttaagaaagttggcaagattattaagaaggatgaggcaagaaaatacgtgattccttctgcacccggaaaacggacgccggacgatacaaaggttacggatctgctatacagctgctatgggcaggcgatcctggaagaggacgaatgcgaggagaattttgaaagcctgcttgctgcaataaagaaacggtatgaagagattataagcggcctggggcttacgcttagcctggatgatgagttccggacgatccgtgagaacttcagcaagaagattggaagagactatgccgcatccaggggagaatacttaaatggcataattatggcagcctatctgggttacgaatttatcgatgccgcagaagtcatcctgtttgacgccgccggcaattttgacgcggagaagacagacaagttattgtccaaaaggctggcgaagacggagcgggccgttataccaggattctacggttccatgccaggaggaaagatcaagacattttccagagggggttccgacattacgggatccattgtctccaaagccgtgcatgccgacctgtacgagaactggacggatgtgtccgggttcttgatcgcggatccaaggatcgtaagaaagcccaaatccattgatgttattacatacagagaattaagggaactatcctatatgggcgcgacggtgctgcatgaagatgccatcttcccggtccgcaaagaaggaattccgattaatatccgcaataccaattcgccggaggacaaaggaaccttgatcgtagagggaacttgcaggaagcctcggtttgtcataacgggaattgccggtaagaaggattttgcgtccattacggtggagaaagccatgatgaactcagaggtgggattctgtaaaaaggtgctggaagtctttgatggaaatgacatttccatcgagcatatgccatccgggatcgatacgatgacgatcttcgtccatcaggatgagttcgaggagaaagaacagaaggtaatcgccggaatccacagggctgtggagccggatttcctggaactggaatcagaccttgctctgattgccgtggtgggaagaggaatgcgcgcgacccggggaacgtctggaaggatcttttccgctttggcgcatgccaacgtcaatgtcaagatgattgaccagggctccagcgagcttaatatcattatcggagtaaggaaccatgattttgaaaccgcagtcaatgcaatctacgatatattcgtgaatacaatgatataaagtcttggggaggtctaaaatgaatattttatttttcttgaagccgaaaagcgagctggcatacatctatgattaccatacgctgcgccaggctttggagattatggaataccacaagtattcttcggtgccgatcttgaatcgggaggggaaatacgttggctcgattacagaaggcgacgttctgtggtcattgaagaagctgaatattctgagcattaaagatgcggaggatatcagcattatgaagattgaacgccggttggactatcaatgcgtaaccgctgaatcgaatatggaagacctgatcggtaaggcgatggaacagaatttcgttccggtggttgatgatcaggaacactttatcggcatcatcacgcggcgcgatatcatcggctattactctgataaaatgaaggaatgtgacaaataattatgataatagattttcatactcatatgtttccagataaaatcgcaaaaggaaccctggattttctggaggggatctgcaaggtaaccccatatactaacggcacatacgaagggctgaaggcgtccggcgaaagggcgggagttgatatctccgtagcgttgccggcagtaacgaaggtatcccggattccttccatcaacaggtttgcctctggctatcttgaaggcccggtgatctcttttggcggcatccatccggaaagcgaaaactacaagcaagaattgcaggagattaagagtcttgggatgaaaggcatcaagctgcatccggactatcaggaaatgtatttcaatgatatccgttacaagaggctggtgtcctacgcctcagaactaggactgatcaccgtcgtgcatgccggacgggatccaaagtgcccggaggacgtacactgcacgcctcagatggcgctggaattaatccgcgaggtagagcccgagaatatggtgcttgcgcatctggggggcaatgagatgtgggatgacgtggaagagtatctggtaggccaagacgtctacttcgatacgggcgtggtactgggcaagataccggatgagcagttcgtccggatcgtacggacccatggcgctgacaagatcttatttgccaccgactccccatgggcagggcagaaagagttcatagaacttttgtccggcatgcctcttacagaggaagaaaaggatcagatattttacaaaaatgcctgcagtttattagcgatatagcgaaagggaatgcctatgaagaaaatagccccgttattcgtattgatggcctccgtcttatggggttcgatgggaattgttaccagatatgtggcagacattggatttactacgagacagacagcagcagtccgcatttgctcggctgctgctgttttgatattgtttcttctgattaccgaccatcggaaactgaagattgagaagcaggatttgaaatggttcttaggaacagggctgggaagcctgttcatcaataacctggcttatgcggagacggtccagagggcgtccctgtctgtggcagtggtccttctttatacggctccgttctttgtcatgatcatgtcgattctgtttttcaaggaaaaactgacgcttcagaaagttgtggcgcttctattgtcttttgccggatgcgtgctggtggtgggactgtccggagccaatgcaggaagcaatggggcggttacgctgctgatcggcctttgtgccggattcggctattccctatacagcatcttcggcaaagtgctggtaggaaaatacgattctcttaccgtaaccgtatatacgttcatcttttcctccatcggaacgctgctcatctgccagccggcatccatggcgcagcgcatcgtggaaaattcttccaagatgcctctggttattatcggaagcgtagtgacgctggcgcttccctatgtcagctattccatagggcttaagtatatggagagcagcaaggcctccatcatctcttctttcgaagtggtggcagccagtttgtttggcgtggcgctgtatcatgagacgctggatgcgtacaatatgataggcatcatctgcgtggtgtcggccttgatacttttgcaggtaaattttcacaagaatacttgatttttaccaattcctgtgatatcatataccagtatgccgcacaatgaggtattaaagttcccacagggacaccgtaattggcgagtaatgataataggaggtgccatatgtacgcgattatagcaacaggtggtaaacagtacaaagtagccgaaggcgatatcattaaagtagaaaaacttggtgtagaggccggagagacttatacatttgaccaagtacttgcagtaagcgataacggattaaaagttggaaatccaaccgttgaaggagcaacagtagaggcttctgtagttgagaacggaaaagcgaagaaagtcattgtttacaagtataagagaaaaactggataccataagaaaaatggtcacagacagcagtatactgcagtaaaaattgacaaaatcaatgcttaatttggagacaatccatgattcatgtaaccatttatgaaaatgacagaaaagaatgcataggcttccagaccaaaggacatgccgaatatgacgagatgggacaggatatcgtatgtgcagccgtttccgtgctggtcattaacacgatgaatgccattgagttatacacggatgacgaggtgtcggtactttccgacgaggaggaagggatcgtttccttccacgagaatggcgcgccctccaaggaggcagcgctgctgttaaagactatgattcttggtcttagagaaatggcggatgatgagaactatgcagaatatattgatttaacattcgaggaggtgtaacaaccatgatgaaattaaaccttcagtttttcgctcataaaaaaggtgttggttctacaaagaacggcagagactctgaatctaagagactgggcgctaaaagagcggatggacagtttgtaaaagctggcaacatcctctacagacagcgtggaacaaagatccatccaggaatcaatgttggccgtggcggagacgatacattattcgcgctggttgatggcgttgtaagatttgagagaaaaggaagagataagaaacaggtttctatctatccggttgctaaataataacagtctactaagaagagtgctgcagataactggttctggttataaggcagtactctttttttagcggtcaggatggggatggcaaatagccgttccttatgatataatatacaggatattggggaaaataagcaaaaaaagaaagaggaacattatatgtttgcagacagagcaaagatattcataaaatcaggaaaaggcggtgacggacacgtcagtttccgccgggaactctatgtgccaaacggcgggcctgacggcggcgatggcggaagaggcggcgatgtcatctttgaagtggatgaggggctgaatactctgcaggattaccggcataggaagaaatatgccgcaaaagatggagagcagggcggtaagcgcagatgccacggcaaggatgcggaagatatcgtgctgaaggtgccggagggaaccgtcatcaaagaatcggaatccggcaaggtaattgccgatatgtccggagacaaccgtcggcaagtgatcttaaaaggcggaagaggcggcctgggaaaccagcatttcgcaacgtctaccatgcagattcccaaatatgcccagcccggacaaccttcccaggaattgtgggtgaatctggagttgaaagtgatcgcggatgtgggccttgtgggatttcccaatgtaggaaagtccacgcttctatccagggtgaccaatgcggatccgaagattgccaactatcattttaccacgctgaatccaaaccttggcgttgtggacttgcctgatggcaggggattcgtgatggcggatatcccagggctgattgaaggcgcatccgaaggagtcggcctgggccatgaattcctgcgccatattgagcgcaccaaattgatgatccatgtggtagatgccgctggtacggaaggcagggacccggttgatgatatctataagatcaacgtggaattagaggcctataacccggatatcgccaaacggccgcaggtgatcgcagccaacaaggtggatgtcatatacccggagggggaagatccgatccagaggctgaaagatgaattcgaacctaagggaatccgtgtcttcccgatatccggcgttaccggagcgggaatcaaggaacttctctactatgtatccgacaggctgagcgagctggatcaggcgccagtgatcttcgagccggaatatttcccggaagaagaactgatccacgagaacctcccatataccgtcgaaaaggaagacgatatctatgtggtggaaggcccgaagatcgagaagatgctgggctataccaacctggactcggagaaaggctttgccttcttccagaagttcttaaaggataccggaatcctggacgaactggaggatgccggcatccaggaaggcgatacggtgcggatgtacgggctgcagtttgattattataaatagcgaaatagaacaggagaatgacagacgatgacgacaaagcaaagagcatacctaaaaagccttgcaatgacaatggacccgatcttccagattgggaagaacagcatgacgccagaacttaccaaagcggttacggaggcgcttcaggcacgggaactgatcaagatcagcgtgctgaagaattgcgccgatgatccccgggacctggcagatatgatggcggaacgcaccaaatcccaggtcgtgcaagtgatcgggaagaagattgtcttatataaggaaggaaaagagaagaataagaagatacaactgccttaatatccctcagcattgcggaggcttcatgtggcagagcgaggcagataattatgaagattggaatcatgggagggacatttgatccgatccataacgggcatcttatgctgggacaggctgcatatgaaacattccatctggatcagatatggttcatgcccaatgggcatcctccccacaaagacagaactacaattgaatccgacgtagatgaccggatcgagatggtgagactggcaatcggcggaaaggaagaattccggctggaactgtatgaggcatgccggaaggaagtatcttatagctacagtacgttggaattttttaataagatatatccggaggatgagttttattttatcatcggcgcggactcgctgtttgccatcgagacttgggcacatccggaacggatatttccagcctgtactgtacttgccacctaccgtgacgagatcaataccagggcggagatggaagcgcagatccagtatctgacgcaaaaatacgatgcccggatctggattttggcaacgcctttgatgagcgtatcgtcaagcgagctaagaagagagattaaaagcggcaagtcgatcgcagcctatgttccatccagcgtggaagactatattatcagaaatcatctgtatgagaggaatggcagcatatgaatcaaaagataacaagaatacgccgtaagctgatggcggaactggacaaagagcgttatgagcataccctgggcgtcatgtataccgccgcgtccatggcaatgcgctacgatgcggacattgataaggcgctgatggcaggactgctccatgactgcgccaaatgtatatccggcgagaacaagatcaagctctgcgacagataccatctgagcgtttcagaagtggagaaggccaaccccagcctgctgcacgcgaaactgggggctttcctggcggcaaagaagtaccatgtagacgacaaggagattgtgaacgccattgccagccacactaccggaaggccgcacatgtcgctgctggagaagattatttatatcgccgattatatcgagcctggcagggaagaacttccaaatatggcggaagtacggaaactggcttttcatgatatcgatgcctgcctgtaccgtatattaaaggattcgctggtatatcttgacagcaggaacatcccgattgaccctatgacagagaaatcatatcaatattataaagacaaattagatcagaaggaggaatagcatggaacaagcaaaggaaatggcacgcgtcgcgttcggggcgctggaagataaaaaaggagaagacacctgtgtcattgatatctcgcatgtctcggtacttgcagattattttgttatatccaatgggaacagcgacagccaggtaagagccctggttgacaacgtggaggaaaagatgcacaaggccgggtttacccagaagcagggagaaggacgaaatggcggctcctgggtgcttctggattacggcgatattatcgtccatgtatttgacagggaaaacagagaattttataacctggagcgcatttggagcgacggaagacgattcgacgacataaaagatttataggctgaatgaggaaagaaccgtagaggaaattttaaagaaagcccgtagtccggcaactatagatcaacgatatttagagatctgtagttgccggactacgggctttcttatcattaggaataaataatcttgtggattacgaaaggaaacggaagactccgataactttgccaagtatctggacctcttttacgataattggatccaaggcatcgttctcgggctgcaagcgaaagacgccttcttctttgaaaaagcgcttcaccgttgcgccgtcctcaacaagggcgacaatcacctcgccgttgcgggcggtctgtctttgctccacaagaacaagatctccgtcaaagatgcctatattaatcatgctgtcgcctttgacgcgcagcataaatgtctggttattaggcatgaattccatgggaatcgggaagtagttctcgacgttctgctcggcaagcagcggctcgcctgcggcaaccctgcctaccattggcacgttgaccatctccctgcgggtgaagttaaaagattcatccagtatctctatcgctcttggcttcgtcggatccctgcgtatgtagccattcttctccagcgtctccaggtgggagtggacgctggaagtggacttgagatgcacagcctcgcatatatcacgcaccgcaggcggaaagcctctttccagtatctgtgattttatgtattctaatatttcctgctgcttcggactaatcttaccctgagccatagaaacctccttatatattgcctgtatcatgcgttctgtaattatttggttatattttatcatagcagattacaaaaagcaaacaaatgtttagaaaatatgttcgaatatttccttgccaagtattgacaaacatgcgttcgagttgtataatctaaaacatagaacagatgttcacaaacaaatgttttcgcacgaggggataagggatagttaagaaggagaggatactatggagaacagcagattacatgtggcaaggaaaagacagagacaagtatttatgaagaagttaatattaggttttgcgggctgtgcgcttgtattggccttaagcgttattttgagtaatggatttgtagacgcccatggcaattccacggagtctccggtcagacataagtattataagagtattgagatcgcatccggcgatactttatgggatattgcaaaagaatatatgaatgaagactatgattctatctatgcttacatcgatgaactgaaatatattaacggactgacatccgatggtattcaggaaggccagtatcttacagtcgcatactatgatacggcgttcaggtaatcgctttgcatgccgtctgtatagtttatttattacggtatataggagttaatcatcttatatatattatactcacccaatttgcggcgtccggcagcgatggagttattcctttgctgtcggacgcttgccttttgattgggcaaggctctataagagcatatctgtcgatagaaatatatctatacgacaaatactgatttttccaaaagatatagacgggggaaacgggatatgctataatatgattaataattgtaaggtataaataacaataaggaggtttcctcatggctgaatcaaagtcatatcatgaacaagtacaggtggaacagacaataaggctaagggaagtcttaaagacgctgccgccgtttgcaaaagatttcttccgggccattgagccaaagtcatccgcaaagacgcggattaattatgcctatgatatccgggtcttttttcattttcttatggagaataatcctacatataagaattattccatagatcagtttacattaggtgaccttgaacggctggagccggtggatattgaggaatatatggaatacctgaaggtctacatacgtgacgacgaactggtgaccaatggggagaaaggcctttcccgcaagatgtcggctcttagaagtttctataactattatttcaagcgtcaggctatctccaggaacccgactttgctggtggatatgccaaaacttcatgataaggcgattatccgtctggatggggatgaggtcgccttgcttctggattttgtagagaactgcggaaacgaactgtccggacaggcattgaactattataagaagacgaaggaccgtgatcttgcgatactgactttgcttcttggcacgggaattcgtgtctccgaatgcgtcggccttgaccttacggatgtagattttaagaataatgggattacggttacgcgcaagggcggcaaccaaatggttgtatattttggggaagaagtagaaaaggctttgaagcactatattgagggctatcgaaaggctgctactcccctctccggccacgaaaatgccctgtttctttccacacagaagaggcggatgggcatccaggcggtggaaaatatggtaaagaagtatgcccggcaggtgacgccgacaaaaaagatcactccccacaagcttcgaagcacctatggcacatctctttataaagagaccggagatatctatcttgtggctgatgttctgggacataaggatgtaaatacgacgaagaagcattatgcggccattgatgaagacagacgccgcaaggcagcgtctgccgtgaagttaagagaaagttgaccatgttatcccacggtcctgcgatttttatagttcgcatacagaagaaggattccgcttatggctcccatgaataaaaaggattgtatcaggggcataaagttgtaacttccgccctgccacagatcgataaagtcgctgcttacgtaagacatgggaagaagggcggcgatcttctgaaggaatccgggaagttggtccgtctgtattcccatcatcccgcacaggaccatgattccaaaatacaggatcattgccagtgcataagtaggcccgaacttccgaaagatattagccagtccgtgagctaggatgaagaaaatgacgcccatcaggtagaggcagatgaccagggtggcagccccggaaaaactggggatttccagatccagcgccgtgtaggacaccaaggtatagattgcaagcgcggcagtcagaacgatgatctgggcaatgatttttgcccgcatcatgaaacgctctgagaagccgaataaccccatgcgaagcggaatatcattctccagttcctgtgaataggtagcggcatagccgagaaagatgatggccatcggggttatcagggacatggtgataaagatggtcgtattggcctgcgcaaccatgcttttcggcacatctcctttgattgcattggttatgatcagcagcatgagaatcggaaatacgattccgaaaaaggaagaaaaaggattcccaatgatattatagatttcataggctaccaatttttttgtgcttttcttattgttcatgatacgcaagcctccttcttgccttcatatgccagtttggcattggcagacataatctcgatatcgctgcagctccgcttaaaattcacattcgcgttgatgagaagttctgcaagcctgtgctctgtctcctctttggcacaggaaagggcgatcagatgcgcaggggaagccagtttgggaaacgactcaagaagacgttcgttttcctgagtgcggtctacaatgaagatcgattttccgcaatatctccagaacagttcatccgttcttccgaagtccacgacctgccctttatccagaatcagcagcttatctaccagcatttctagttcctcataatagtgggatacaatgcatagcgtatggttctttttgtccttataccaggcagataattttcccatcagccgctgtctggtttcaaagtccagccccgaagtcacttcatcatagaaggtaaggggcgcatcctgcatcatcaccagaatgatcgtcagcctctgcttctgccctccggaaagcgcggaatatcgctttctaaggcaagggccgaattcaaaatagtcaatcagttcttttagtttcccatctttcttaatatccgtattgagaacagtttccataatgacctttacgggcatggttgaagcataatgattctgctgcagatgggccgccatctgttccggccttaggctggtccgtatggttcctctgtaatgggtcagtcccaggatggtgcggaccagcgtagtctttcccgcgccgttggagccgatgattcctatccgttctccggagtcgatggcaataggcttttgtatctgcaaggccgtctgttttccatattgcacctgcaagttctgtatggttacgagcattgtgatatgcctccttttcctttgatgctgttattctagcatgatgatatgaatttccgatgaatatggcgtagaggctgtatgaaatcaaatcagggaatcctaagtatagccagcacgccgccggactcgttgacaatctttacgtcgcagcccaggatctgggcatagtaggaaaggatgtacaatcccagcccacgccctttcttctgtacatcgctgctgacaaatggctcgtagatatcagggagcagcgactcttcgatgtgccctccatggttaaaaatcttcaggcacttctcttctagcgtaacctggatcaggttgccggcaggcgtgtaggatacggcattggataccaggttgtcgacaatcttctttagcatatcccggtccgtgcagacgggcccggatgctccctctattcggaatgtcaggttatttgtggatgcctgtacttggtaacccaggacaatctcatctgccagcccctttagatcaaaggactccttctccatatgctcggtacaatggttcaggtacagaatatcctccacaatcttctgcataatctttaactgctgttttacttggggaagatacttctgggtatccttatacttgcccacctcattcatcatgccttctaccagaagaagggccgccgtaaccggagtcttaagctggtgggaagatgcgcgcaaaaagacttcctggcgcttattctcctgggccagggcctggttcttctgctctagggcctgatattggaggcgcagctgcccatacaattcgttcaaggtggcgcccagttctccaatctcgtctttggaagtgacggatagcggctcaatctccatatgtccggccatcttcacttcttccgcatattgtgcaaggcgaatgaccggaatcacgatctttctggaaaacatgcgggaggcgataagcacgatcaggaataccacagccatcagcataggaaggctgcttaataccaccggagtaatttcattcatctgcggggtcatcaccggaaggaaggataggatcagcgcgtctgaagttcttcccgccgcaatataggaagtgtattcattcgtatcatcgatgattcctccctcaaatacgatgatattgtcagagataacgtgagtcttcaccttcttttccttgaacgagtcatcgtttaaatcttcatccgcttccagatggatgttgactggaagatctttcagggattctttattgagattgaagatagatttcatcctatctttgtcgatatccggcagctgaatatcttccatatcgtctcccgaggaaaatgcctgctggatttcctgcagaaattcctttaactcgggctcatccgcctgtaccgtaatccggaagttctttcccgcgatatacaccgtgtctccggaaaggggaatctccacggacatggagccggtaggattcttaaccgtcaggcctttataactgcggtttttcatatagcctttttgtacgtctactacggacttcaggtcatcctttttggcataatccacgtatagggatggcatcataaagcagaaatagactacgacgaaggccatcaggactgccgagatcaggacgctgtagcacagagtcttctttgtcaggcgcatttttaattcctcccatccttttcgccaggcgaggcatactgatagcctacgccgatcaccgtcttaatcaggttcattggcagttttttccttaggtttttaacgtgggcatcaataatcctgtcgtttccgatatattcttcattaaatatccggagaatcaactgctctcttgtaaatacccgctgaggctcctgataaagcgtgctaagaagcaggtactcgcttagcgtcagcggaagagcctggccatcaaaataagcctgataagcgtcctggtctatggaaagtccctgctctgccctgtccgtctgatccttaatgcctggcgaagtcctgttatgcgtggtgcgtcttaagatggtctccattctttttaacaggatcaatggggacaccggcttgatgacatagtcatccgcataggcattgaacgcctttacctgcgtctgctcatcgtccagggctgtcagcatgatgacggccatatccggatattcctgccgaatataggcaaggacttccagcccgcttcttttgggcacgatgatatccagcaccgccagatcaaaattttggctcttaagcagagcgacggcttcatcgccgtcacaggcttccgtgacttcataacgctgcattttcatatattctgccaatacttccctgatggttggctcatcttccaggaataatattcttcgcataagtgcttctccctctttttattcatattgatgccattataacagaaagatatgaatttcaaatgaagaagcttagattcttctcttttttcttgtaaaataggcatgtatcatgtaatctatatgtggactgacattgaagttggaaaggacggacataggatgaaattacagcaattgttgagttataccagaaaggccgtagatgaatatggcctgatagacgaaggcgatcatatcgccgtaggaatctcaggtggaaaggacagtctgacgcttctgtacgcgctccatgggcttaggcggttctatccaaaaaagttcgagttaagcgcggttacggtggatcttggctacagcgaatgcgactttaccccggtcgtttatctatgcgaagaactgggagttccctataagatcgtaaagacggatatcgcccatatcctgtttgatgagcgtaaagaaagcaacccctgctctctatgtgccaagatgcgtaaaggcgctcttaatcaggcggtcaaggagatgggctgcaacaaagtagcctacgcccaccacaaggatgatatcatcgagaccatgctgctgtccctgatatttgaaggacgcttctactccttctctccaaagacctatctggatcgcatggatctgacggtgatccgcccgatcatgttcgtagacgaggcagaagtgattggatttaagcagaagtatgatctgcccgtagtgaccagccgctgtccaattgatgggtataccaagcgccagtacgcaaaagaactggttaagcagctggacgatgagcatgccggcgccaggcagcggatgttcacggcaatactgaacggcaacattaagggatggcctccacggattccccatgtacgctgataataaaactccggatactagcttggataataattgatcacgataaatataagattgctgaattagaggcgatatttatctatcataaaagggatctcccaccgctggattttattctagctatgggagatcccttttttacttaaaatgtaggattctataatttcttgtcgccttcgcgctctttaatctcgatcagcctctcgatcgcctccgcggtgccttccctgcccagtacggaactgtccaggcagatgtcataactctccgccgcgccccatttcttattgctataatagttatagtagctggcgcgcttcttatcggtcttgacaatcatatctttggctttggcgtctgtcaagtcatagatgcgggcaatcctccggatacgggaatccagatctgcatggatgaagacgctcaatacgttgtcgtattcttccagagcataatcggcacatcgccctaccagaatgcaagggccctcatccgcgatctttttgatcgcgtcgaactgagccagaaataccttatggttaatcggcatatctgtatagtttcctgaggaataacccagagaataggtgtccattaccagagaatataaaaaactgttggttggtttttcgtcgtgagtctcgaataactcctggcatatgccgctctctttcgcagcacggtccagcatctccttatcatataatttaatgcccaggtccttggcgacttgatagccaatttcccggccggcacttccaaactgcctgccgatagtgatgatcgtattcgttttagccataccaatcacgctcctcttcataattatacaatcattatatatcaattaaggggaaatgtatagaattttctaatagttttgggctaggatttccttagtttgtctaacaattctatgaaataagccggaagcggggcatttacttccagatattccccggttcttggatggatgattccaagcgtcctggcatgcagcgtctggccctgaagatgcgggaaggggcacttcttcggcccgtatacgccatcccccaaaagcggatggcccaggcttgccatgtgcacgcggatctggtgagtccgcccggtttccagctcgcatcggatataggtatagtcgccaaagcgctccagcacctgataatgggtaaccgcctctcttccattcctgctgtggatactcatcttcttgcgctccgtgggatgcctgccgatcggggcatttacggtcccatactcctccttgatattcccgtggacgatggcgacatagatacgccggatggagtgttctttcaactgcctggaaagactctgatgcgccatgtcatttttgcaggccaccagtgatcccgtcgtgtccatatcgatcctgtgtacgattcccggcctcatggtgccgttaatgcccgacagatccgagccgcagtggtacatcagggcattcaccagcgtctggctgtagtgcccgggcgctggatgcacgaccatctgctttggcttattgacaatgatgatatccttgtcttcatagaggatgtccaaaggaatgtcctcaggccggatatccggctcttttgcctccggaaggtctatctctaccctgtcacccaaagaaagcctgtaattggcttttacaggcttctggttcacagtcacatagttctctttgattaatttctggatataggatctggaacgatccgccaattcctcggaaagatatcggtcaatacgctctccatcctgattctcaactgtgaaaaattctttcaaggtcttcctccttataatagatgaataccagaagtatcaaggcaacggcagataccgtaacgtagatatccgccatgttgaaaatcggaaaatctatcagcttaaagtaaaaaaagtcgaccacataattcaggcggattctgtcaatacagtttccaaaggcccccgccacaataaatacggcacatagccgaagcggcagaaaacgcttctccataggcaccttgcgatagaaccacaagacgacagcgcatatgacgatgacgcttaggaaaaagaagatcttctggttctgaaacagcccgaaggccgcgcccctgttctccagatattccagctggaatacttccttgatgatgataaagggggactgtcccttcagccggtcaatcgccaggcacttggtaaactgatccaggaataccagtacggctatgcctatgactgctgctatataatgattcgttctgcttttctctctcaacatattcttcctcttctagatatatttgcggatggataccatataacggcctttcttggtctcagacaggatgccgttatatcctatccgtcccatcttcctgacagataggatgtctccttctttcagacggtatccattgctggtcaccagtttcccatttacaaacaccctggctccttcgatgagtccggtgatcttgcttctggatagaggataggccagagaaagcacggtgtccagccgcaccgatgccaccgtcccttttaactcctcataacgcggctcataagaatcctcgaatgccgacagaatagaggtctttaccgtagtgtggcggatcctggtcagatgttccatgatatatcccgccagttcctccttggcaaacagaatggcttttccatcctcgatcagaatgtcgcccaacttgcatctttcaattcccaggttcatgaccgctcccagataatcgcggtggcttaactcctctgcgaattttctgttaactggtgaaatctctataatctgaatagggtactgataatcataataaagagcatcaggtagaaatgcagccatctgacgctctgataagccatatccgccataagtcttatagtgggataagagcatgtcctttggcgtggtatgtaatatatttaattcattcagattaagaaactcggagaatgtaacaatctcccgtgtatacgcgatcctggaaagttcggccaggcgcttctgaagcagtagttcctctttgttcataatcagaacctggaacgcatagaggatgcgtcaaaagaagtgttcagcagatcctgcaagtctccggaaatgtctacgttggtaggcgttaccaggaatatgtaattagaaatcttctgcagattgccgctgatggcaaatgtcgcgcctgacgtaaagtcaataatacgctgggccacttcaagatccaatccttcgagattcaagatcacggtccttccgctcagaagggtctccgtaatctcgcgggcatcgtcaacggatgtaggcttgattacgcatacttccatactgacgttgttccttctcgcaggctggcgcatcggggttactttattgttagatcgggaagacctggactttgccggaagcgcatagtcgtcttcgtaatcctcctcttcgtcgtaatctttataatctttagatttatggaagagacttttcttaggcttttcttcatagtcgtcttcatagtcatcgtcaaagaaatcatcgtcatcgtaatcgtcatcatcacttaacttcatgatatctaaaaacttatctaatactcccattttaaaactt
